United States Patent Application Publication US 2026/0337638 A1, published October 29, 2026 (application 19/113,088).

The application's sequence listing, which the Patent Office published only in electronic form, follows.

SEQUENCE LISTING (7839 sequences)

SEQ ID NO: 1 - RNA, 20 nt, synthetic construct
  source 1..20: mol_type = other RNA
aaaaggagggttccatctac

SEQ ID NO: 2 - RNA, 20 nt, synthetic construct
  source 1..20: mol_type = other RNA
aaaggagggttccatctacc

SEQ ID NO: 3 - RNA, 20 nt, synthetic construct
  source 1..20: mol_type = other RNA
aaagtccccatccggactca

SEQ ID NO: 4 - RNA, 20 nt, synthetic construct
  source 1..20: mol_type = other RNA
aaccctccttttactcctct

SEQ ID NO: 5 - RNA, 20 nt, synthetic construct
  source 1..20: mol_type = other RNA
aacttcttgagtccggatgg

SEQ ID NO: 6 - RNA, 20 nt, synthetic construct
  source 1..20: mol_type = other RNA
aagaagttctcaggactcag

SEQ ID NO: 7 - RNA, 20 nt, synthetic construct
  source 1..20: mol_type = other RNA
aaggagggttccatctacca

SEQ ID NO: 8 - RNA, 20 nt, synthetic construct
  source 1..20: mol_type = other RNA
aagggccagggcctccgaga

SEQ ID NO: 9 - RNA, 20 nt, synthetic construct
  source 1..20: mol_type = other RNA
aagtccccatccggactcaa

SEQ ID NO: 10 - RNA, 20 nt, synthetic construct
  source 1..20: mol_type = other RNA
aagttctcaggactcagagg

SEQ ID NO: 11 - RNA, 20 nt, synthetic construct
  source 1..20: mol_type = other RNA
accatgatcccagcctctga

SEQ ID NO: 12 - RNA, 20 nt, synthetic construct
  source 1..20: mol_type = other RNA
acccgcccaggtctgggtaa

SEQ ID NO: 13 - RNA, 20 nt, synthetic construct
  source 1..20: mol_type = other RNA
accctccttttactcctctc

SEQ ID NO: 14 - RNA, 20 nt, synthetic construct
  source 1..20: mol_type = other RNA
acgactcccgactataaagt

SEQ ID NO: 15 - RNA, 20 nt, synthetic construct
  source 1..20: mol_type = other RNA
actataaagtccccatccgg

SEQ ID NO: 16 - RNA, 20 nt, synthetic construct
  source 1..20: mol_type = other RNA
actcaagaagttctcaggac

SEQ ID NO: 17 - RNA, 20 nt, synthetic construct
  source 1..20: mol_type = other RNA
actcacccgcccaggtctgg

SEQ ID NO: 18 - RNA, 20 nt, synthetic construct
  source 1..20: mol_type = other RNA
actcagaggctgggatcatg

SEQ ID NO: 19 - RNA, 20 nt, synthetic construct
  source 1..20: mol_type = other RNA
actcccgactataaagtccc

SEQ ID NO: 20 - RNA, 20 nt, synthetic construct
  source 1..20: mol_type = other RNA
actcctctcggaggccctgg

SEQ ID NO: 21 - RNA, 20 nt, synthetic construct
  source 1..20: mol_type = other RNA
acttcttgagtccggatggg

SEQ ID NO: 22 - RNA, 20 nt, synthetic construct
  source 1..20: mol_type = other RNA
agaacttcttgagtccggat

SEQ ID NO: 23 - RNA, 20 nt, synthetic construct
  source 1..20: mol_type = other RNA
agaagttctcaggactcaga

SEQ ID NO: 24 - RNA, 20 nt, synthetic construct
  source 1..20: mol_type = other RNA
agaggagtaaaaggagggtt

SEQ ID NO: 25 - RNA, 20 nt, synthetic construct
  source 1..20: mol_type = other RNA
agaggccgtttccatcccga

SEQ ID NO: 26 - RNA, 20 nt, synthetic construct
  source 1..20: mol_type = other RNA
agaggctgggatcatggtag

SEQ ID NO: 27 - RNA, 20 nt, synthetic construct
  source 1..20: mol_type = other RNA
agatggaaccctccttttac

SEQ ID NO: 28 - RNA, 20 nt, synthetic construct
  source 1..20: mol_type = other RNA
agcctctgagtcctgagaac

SEQ ID NO: 29 - RNA, 20 nt, synthetic construct
  source 1..20: mol_type = other RNA
aggactcagaggctgggatc

SEQ ID NO: 30 - RNA, 20 nt, synthetic construct
  source 1..20: mol_type = other RNA
aggagggttccatctaccat

SEQ ID NO: 31 - RNA, 20 nt, synthetic construct
  source 1..20: mol_type = other RNA
aggagtaaaaggagggttcc

SEQ ID NO: 32 - RNA, 20 nt, synthetic construct
  source 1..20: mol_type = other RNA
aggccctggcccttacccag

SEQ ID NO: 33 - RNA, 20 nt, synthetic construct
  source 1..20: mol_type = other RNA
aggccgtttccatcccgacc

SEQ ID NO: 34 - RNA, 20 nt, synthetic construct
  source 1..20: mol_type = other RNA
aggctgggatcatggtagat

SEQ ID NO: 35 - RNA, 20 nt, synthetic construct
  source 1..20: mol_type = other RNA
agggccagggcctccgagag

SEQ ID NO: 36 - RNA, 20 nt, synthetic construct
  source 1..20: mol_type = other RNA
agggcctccgagaggagtaa

SEQ ID NO: 37 - RNA, 20 nt, synthetic construct
  source 1..20: mol_type = other RNA
agggttccatctaccatgat

SEQ ID NO: 38 - RNA, 20 nt, synthetic construct
  source 1..20: mol_type = other RNA
aggtctgggtaagggccagg

SEQ ID NO: 39 - RNA, 20 nt, synthetic construct
  source 1..20: mol_type = other RNA
agtaaaaggagggttccatc

SEQ ID NO: 40 - RNA, 20 nt, synthetic construct
  source 1..20: mol_type = other RNA
agtccccatccggactcaag

SEQ ID NO: 41 - RNA, 20 nt, synthetic construct
  source 1..20: mol_type = other RNA
agtccggatggggactttat

SEQ ID NO: 42 - RNA, 20 nt, synthetic construct
  source 1..20: mol_type = other RNA
agtcctgagaacttcttgag

SEQ ID NO: 43 - RNA, 20 nt, synthetic construct
  source 1..20: mol_type = other RNA
agtgcggggtcgggatggaa

SEQ ID NO: 44 - RNA, 20 nt, synthetic construct
  source 1..20: mol_type = other RNA
agttctcaggactcagaggc

SEQ ID NO: 45 - RNA, 20 nt, synthetic construct
  source 1..20: mol_type = other RNA
ataaagtccccatccggact

SEQ ID NO: 46 - RNA, 20 nt, synthetic construct
  source 1..20: mol_type = other RNA
atcatggtagatggaaccct

SEQ ID NO: 47 - RNA, 20 nt, synthetic construct
  source 1..20: mol_type = other RNA
atcccagcctctgagtcctg

SEQ ID NO: 48 - RNA, 20 nt, synthetic construct
  source 1..20: mol_type = other RNA
atcccgaccccgcactcacc

SEQ ID NO: 49 - RNA, 20 nt, synthetic construct
  source 1..20: mol_type = other RNA
atccggactcaagaagttct

SEQ ID NO: 50 - RNA, 20 nt, synthetic construct
  source 1..20: mol_type = other RNA
atctaccatgatcccagcct

SEQ ID NO: 51 - RNA, 20 nt, synthetic construct
  source 1..20: mol_type = other RNA
atgatcccagcctctgagtc

SEQ ID NO: 52 - RNA, 20 nt, synthetic construct
  source 1..20: mol_type = other RNA
atggaaccctccttttactc

SEQ ID NO: 53 - RNA, 20 nt, synthetic construct
  source 1..20: mol_type = other RNA
atggggactttatagtcggg

SEQ ID NO: 54 - RNA, 20 nt, synthetic construct
  source 1..20: mol_type = other RNA
atggtagatggaaccctcct

SEQ ID NO: 55 - RNA, 20 nt, synthetic construct
  source 1..20: mol_type = other RNA
caagaagttctcaggactca

SEQ ID NO: 56 - RNA, 20 nt, synthetic construct
  source 1..20: mol_type = other RNA
cacccgcccaggtctgggta

SEQ ID NO: 57 - RNA, 20 nt, synthetic construct
  source 1..20: mol_type = other RNA
cacgactcccgactataaag

SEQ ID NO: 58 - RNA, 20 nt, synthetic construct
  source 1..20: mol_type = other RNA
cactcacccgcccaggtctg

SEQ ID NO: 59 - RNA, 20 nt, synthetic construct
  source 1..20: mol_type = other RNA
cagaggctgggatcatggta

SEQ ID NO: 60 - RNA, 20 nt, synthetic construct
  source 1..20: mol_type = other RNA
cagcctctgagtcctgagaa

SEQ ID NO: 61 - RNA, 20 nt, synthetic construct
  source 1..20: mol_type = other RNA
caggactcagaggctgggat

SEQ ID NO: 62 - RNA, 20 nt, synthetic construct
  source 1..20: mol_type = other RNA
cagggcctccgagaggagta

SEQ ID NO: 63 - RNA, 20 nt, synthetic construct
  source 1..20: mol_type = other RNA
caggtctgggtaagggccag

SEQ ID NO: 64 - RNA, 20 nt, synthetic construct
  source 1..20: mol_type = other RNA
catcccgaccccgcactcac

SEQ ID NO: 65 - RNA, 20 nt, synthetic construct
  source 1..20: mol_type = other RNA
catccggactcaagaagttc

SEQ ID NO: 66 - RNA, 20 nt, synthetic construct
  source 1..20: mol_type = other RNA
catctaccatgatcccagcc

SEQ ID NO: 67 - RNA, 20 nt, synthetic construct
  source 1..20: mol_type = other RNA
catgatcccagcctctgagt

SEQ ID NO: 68 - RNA, 20 nt, synthetic construct
  source 1..20: mol_type = other RNA
catggtagatggaaccctcc

SEQ ID NO: 69 - RNA, 20 nt, synthetic construct
  source 1..20: mol_type = other RNA
ccacgactcccgactataaa

SEQ ID NO: 70 - RNA, 20 nt, synthetic construct
  source 1..20: mol_type = other RNA
ccagcctctgagtcctgaga

SEQ ID NO: 71 - RNA, 20 nt, synthetic construct
  source 1..20: mol_type = other RNA
ccagggcctccgagaggagt

SEQ ID NO: 72 - RNA, 20 nt, synthetic construct
  source 1..20: mol_type = other RNA
ccaggtctgggtaagggcca

SEQ ID NO: 73 - RNA, 20 nt, synthetic construct
  source 1..20: mol_type = other RNA
ccatcccgaccccgcactca

SEQ ID NO: 74 - RNA, 20 nt, synthetic construct
  source 1..20: mol_type = other RNA
ccatccggactcaagaagtt

SEQ ID NO: 75 - RNA, 20 nt, synthetic construct
  source 1..20: mol_type = other RNA
ccatctaccatgatcccagc

SEQ ID NO: 76 - RNA, 20 nt, synthetic construct
  source 1..20: mol_type = other RNA
ccatgatcccagcctctgag

SEQ ID NO: 77 - RNA, 20 nt, synthetic construct
  source 1..20: mol_type = other RNA
cccagcctctgagtcctgag

SEQ ID NO: 78 - RNA, 20 nt, synthetic construct
  source 1..20: mol_type = other RNA
cccaggtctgggtaagggcc

SEQ ID NO: 79 - RNA, 20 nt, synthetic construct
  source 1..20: mol_type = other RNA
cccatccggactcaagaagt

SEQ ID NO: 80 - RNA, 20 nt, synthetic construct
  source 1..20: mol_type = other RNA
ccccatccggactcaagaag

SEQ ID NO: 81 - RNA, 20 nt, synthetic construct
  source 1..20: mol_type = other RNA
cccgactataaagtccccat

SEQ ID NO: 82 - RNA, 20 nt, synthetic construct
  source 1..20: mol_type = other RNA
cccgcactcacccgcccagg

SEQ ID NO: 83 - RNA, 20 nt, synthetic construct
  source 1..20: mol_type = other RNA
cccgcccaggtctgggtaag

SEQ ID NO: 84 - RNA, 20 nt, synthetic construct
  source 1..20: mol_type = other RNA
cccggtagaggccgtttcca

SEQ ID NO: 85 - RNA, 20 nt, synthetic construct
  source 1..20: mol_type = other RNA
ccctccttttactcctctcg

SEQ ID NO: 86 - RNA, 20 nt, synthetic construct
  source 1..20: mol_type = other RNA
ccctggcccttacccagacc

SEQ ID NO: 87 - RNA, 20 nt, synthetic construct
  source 1..20: mol_type = other RNA
cccttacccagacctgggcg

SEQ ID NO: 88 - RNA, 20 nt, synthetic construct
  source 1..20: mol_type = other RNA
ccgactataaagtccccatc

SEQ ID NO: 89 - RNA, 20 nt, synthetic construct
  source 1..20: mol_type = other RNA
ccgagaggagtaaaaggagg

SEQ ID NO: 90 - RNA, 20 nt, synthetic construct
  source 1..20: mol_type = other RNA
ccgcactcacccgcccaggt

SEQ ID NO: 91 - RNA, 20 nt, synthetic construct
  source 1..20: mol_type = other RNA
ccgcccaggtctgggtaagg

SEQ ID NO: 92 - RNA, 20 nt, synthetic construct
  source 1..20: mol_type = other RNA
ccggactcaagaagttctca

SEQ ID NO: 93 - RNA, 20 nt, synthetic construct
  source 1..20: mol_type = other RNA
ccggatggggactttatagt

SEQ ID NO: 94 - RNA, 20 nt, synthetic construct
  source 1..20: mol_type = other RNA
ccggtagaggccgtttccat

SEQ ID NO: 95 - RNA, 20 nt, synthetic construct
  source 1..20: mol_type = other RNA
ccgtttccatcccgaccccg

SEQ ID NO: 96 - RNA, 20 nt, synthetic construct
  source 1..20: mol_type = other RNA
cctccgagaggagtaaaagg

SEQ ID NO: 97 - RNA, 20 nt, synthetic construct
  source 1..20: mol_type = other RNA
cctccttttactcctctcgg

SEQ ID NO: 98 - RNA, 20 nt, synthetic construct
  source 1..20: mol_type = other RNA
cctctcggaggccctggccc

SEQ ID NO: 99 - RNA, 20 nt, synthetic construct
  source 1..20: mol_type = other RNA
cctctgagtcctgagaactt

SEQ ID NO: 100 - RNA, 20 nt, synthetic construct
  source 1..20: mol_type = other RNA
cctgagaacttcttgagtcc

SEQ ID NO: 101 - RNA, 20 nt, synthetic construct
  source 1..20: mol_type = other RNA
cctggcccttacccagacct

SEQ ID NO: 102 - RNA, 20 nt, synthetic construct
  source 1..20: mol_type = other RNA
cctgggcgggtgagtgcggg

SEQ ID NO: 103 - RNA, 20 nt, synthetic construct
  source 1..20: mol_type = other RNA
ccttacccagacctgggcgg

SEQ ID NO: 104 - RNA, 20 nt, synthetic construct
  source 1..20: mol_type = other RNA
ccttttactcctctcggagg

SEQ ID NO: 105 - RNA, 20 nt, synthetic construct
  source 1..20: mol_type = other RNA
cgactataaagtccccatcc

SEQ ID NO: 106 - RNA, 20 nt, synthetic construct
  source 1..20: mol_type = other RNA
cgactcccgactataaagtc

SEQ ID NO: 107 - RNA, 20 nt, synthetic construct
  source 1..20: mol_type = other RNA
cgagaggagtaaaaggaggg

SEQ ID NO: 108 - RNA, 20 nt, synthetic construct
  source 1..20: mol_type = other RNA
cgcactcacccgcccaggtc

SEQ ID NO: 109 - RNA, 20 nt, synthetic construct
  source 1..20: mol_type = other RNA
cgccacgactcccgactata

SEQ ID NO: 110 - RNA, 20 nt, synthetic construct
  source 1..20: mol_type = other RNA
cgcccaggtctgggtaaggg

SEQ ID NO: 111 - RNA, 20 nt, synthetic construct
  source 1..20: mol_type = other RNA
cggactcaagaagttctcag

SEQ ID NO: 112 - RNA, 20 nt, synthetic construct
  source 1..20: mol_type = other RNA
cggaggccctggcccttacc

SEQ ID NO: 113 - RNA, 20 nt, synthetic construct
  source 1..20: mol_type = other RNA
cggatggggactttatagtc

SEQ ID NO: 114 - RNA, 20 nt, synthetic construct
  source 1..20: mol_type = other RNA
cggggtcgggatggaaacgg

SEQ ID NO: 115 - RNA, 20 nt, synthetic construct
  source 1..20: mol_type = other RNA
cgggtgagtgcggggtcggg

SEQ ID NO: 116 - RNA, 20 nt, synthetic construct
  source 1..20: mol_type = other RNA
cggtagaggccgtttccatc

SEQ ID NO: 117 - RNA, 20 nt, synthetic construct
  source 1..20: mol_type = other RNA
cgtttccatcccgaccccgc

SEQ ID NO: 118 - RNA, 20 nt, synthetic construct
  source 1..20: mol_type = other RNA
ctaccatgatcccagcctct

SEQ ID NO: 119 - RNA, 20 nt, synthetic construct
  source 1..20: mol_type = other RNA
ctataaagtccccatccgga

SEQ ID NO: 120 - RNA, 20 nt, synthetic construct
  source 1..20: mol_type = other RNA
ctcaagaagttctcaggact

SEQ ID NO: 121 - RNA, 20 nt, synthetic construct
  source 1..20: mol_type = other RNA
ctcacccgcccaggtctggg

SEQ ID NO: 122 - RNA, 20 nt, synthetic construct
  source 1..20: mol_type = other RNA
ctcagaggctgggatcatgg

SEQ ID NO: 123 - RNA, 20 nt, synthetic construct
  source 1..20: mol_type = other RNA
ctcaggactcagaggctggg

SEQ ID NO: 124 - RNA, 20 nt, synthetic construct
  source 1..20: mol_type = other RNA
ctcccgactataaagtcccc

SEQ ID NO: 125 - RNA, 20 nt, synthetic construct
  source 1..20: mol_type = other RNA
ctccgagaggagtaaaagga

SEQ ID NO: 126 - RNA, 20 nt, synthetic construct
  source 1..20: mol_type = other RNA
ctcctctcggaggccctggc

SEQ ID NO: 127 - RNA, 20 nt, synthetic construct
  source 1..20: mol_type = other RNA
ctccttttactcctctcgga

SEQ ID NO: 128 - RNA, 20 nt, synthetic construct
  source 1..20: mol_type = other RNA
ctcggaggccctggccctta

SEQ ID NO: 129 - RNA, 20 nt, synthetic construct
  source 1..20: mol_type = other RNA
ctctcggaggccctggccct

SEQ ID NO: 130 - RNA, 20 nt, synthetic construct
  source 1..20: mol_type = other RNA
ctctgagtcctgagaacttc

SEQ ID NO: 131 - RNA, 20 nt, synthetic construct
  source 1..20: mol_type = other RNA
ctgagaacttcttgagtccg

SEQ ID NO: 132 - RNA, 20 nt, synthetic construct
  source 1..20: mol_type = other RNA
ctgagtcctgagaacttctt

SEQ ID NO: 133 - RNA, 20 nt, synthetic construct
  source 1..20: mol_type = other RNA
ctggcccttacccagacctg

SEQ ID NO: 134 - RNA, 20 nt, synthetic construct
  source 1..20: mol_type = other RNA
ctgggatcatggtagatgga

SEQ ID NO: 135 - RNA, 20 nt, synthetic construct
  source 1..20: mol_type = other RNA
ctgggcgggtgagtgcgggg

SEQ ID NO: 136 - RNA, 20 nt, synthetic construct
  source 1..20: mol_type = other RNA
ctgggtaagggccagggcct

SEQ ID NO: 137 - RNA, 20 nt, synthetic construct
  source 1..20: mol_type = other RNA
cttacccagacctgggcggg

SEQ ID NO: 138 - RNA, 20 nt, synthetic construct
  source 1..20: mol_type = other RNA
cttcttgagtccggatgggg

SEQ ID NO: 139 - RNA, 20 nt, synthetic construct
  source 1..20: mol_type = other RNA
cttgagtccggatggggact

SEQ ID NO: 140 - RNA, 20 nt, synthetic construct
  source 1..20: mol_type = other RNA
cttttactcctctcggaggc

SEQ ID NO: 141 - RNA, 20 nt, synthetic construct
  source 1..20: mol_type = other RNA
gaaccctccttttactcctc

SEQ ID NO: 142 - RNA, 20 nt, synthetic construct
  source 1..20: mol_type = other RNA
gaacttcttgagtccggatg

SEQ ID NO: 143 - RNA, 20 nt, synthetic construct
  source 1..20: mol_type = other RNA
gaagttctcaggactcagag

SEQ ID NO: 144 - RNA, 20 nt, synthetic construct
  source 1..20: mol_type = other RNA
gactataaagtccccatccg

SEQ ID NO: 145 - RNA, 20 nt, synthetic construct
  source 1..20: mol_type = other RNA
gactcaagaagttctcagga

SEQ ID NO: 146 - RNA, 20 nt, synthetic construct
  source 1..20: mol_type = other RNA
gactcagaggctgggatcat

SEQ ID NO: 147 - RNA, 20 nt, synthetic construct
  source 1..20: mol_type = other RNA
gactcccgactataaagtcc

SEQ ID NO: 148 - RNA, 20 nt, synthetic construct
  source 1..20: mol_type = other RNA
gagaacttcttgagtccgga

SEQ ID NO: 149 - RNA, 20 nt, synthetic construct
  source 1..20: mol_type = other RNA
gagaggagtaaaaggagggt

SEQ ID NO: 150 - RNA, 20 nt, synthetic construct
  source 1..20: mol_type = other RNA
gaggagtaaaaggagggttc

SEQ ID NO: 151 - RNA, 20 nt, synthetic construct
  source 1..20: mol_type = other RNA
gaggccctggcccttaccca

SEQ ID NO: 152 - RNA, 20 nt, synthetic construct
  source 1..20: mol_type = other RNA
gaggccgtttccatcccgac

SEQ ID NO: 153 - RNA, 20 nt, synthetic construct
  source 1..20: mol_type = other RNA
gaggctgggatcatggtaga

SEQ ID NO: 154 - RNA, 20 nt, synthetic construct
  source 1..20: mol_type = other RNA
gagggttccatctaccatga

SEQ ID NO: 155 - RNA, 20 nt, synthetic construct
  source 1..20: mol_type = other RNA
gagtaaaaggagggttccat

SEQ ID NO: 156 - RNA, 20 nt, synthetic construct
  source 1..20: mol_type = other RNA
gagtccggatggggacttta

SEQ ID NO: 157 - RNA, 20 nt, synthetic construct
  source 1..20: mol_type = other RNA
gagtcctgagaacttcttga

SEQ ID NO: 158 - RNA, 20 nt, synthetic construct
  source 1..20: mol_type = other RNA
gagtgcggggtcgggatgga

SEQ ID NO: 159 - RNA, 20 nt, synthetic construct
  source 1..20: mol_type = other RNA
gatcatggtagatggaaccc

SEQ ID NO: 160 - RNA, 20 nt, synthetic construct
  source 1..20: mol_type = other RNA
gatcccagcctctgagtcct

SEQ ID NO: 161 - RNA, 20 nt, synthetic construct
  source 1..20: mol_type = other RNA
gatggaaccctccttttact

SEQ ID NO: 162 - RNA, 20 nt, synthetic construct
  source 1..20: mol_type = other RNA
gatggggactttatagtcgg

SEQ ID NO: 163 - RNA, 20 nt, synthetic construct
  source 1..20: mol_type = other RNA
gcactcacccgcccaggtct

SEQ ID NO: 164 - RNA, 20 nt, synthetic construct
  source 1..20: mol_type = other RNA
gccacgactcccgactataa

SEQ ID NO: 165 - RNA, 20 nt, synthetic construct
  source 1..20: mol_type = other RNA
gccagggcctccgagaggag

SEQ ID NO: 166 - RNA, 20 nt, synthetic construct
  source 1..20: mol_type = other RNA
gcccaggtctgggtaagggc

SEQ ID NO: 167 - RNA, 20 nt, synthetic construct
  source 1..20: mol_type = other RNA
gccctggcccttacccagac

SEQ ID NO: 168 - RNA, 20 nt, synthetic construct
  source 1..20: mol_type = other RNA
gcccttacccagacctgggc

SEQ ID NO: 169 - RNA, 20 nt, synthetic construct
  source 1..20: mol_type = other RNA
gccgtttccatcccgacccc

SEQ ID NO: 170 - RNA, 20 nt, synthetic construct
  source 1..20: mol_type = other RNA
gcctccgagaggagtaaaag

SEQ ID NO: 171 - RNA, 20 nt, synthetic construct
  source 1..20: mol_type = other RNA
gcctctgagtcctgagaact

SEQ ID NO: 172 - RNA, 20 nt, synthetic construct
  source 1..20: mol_type = other RNA
gcggggtcgggatggaaacg

SEQ ID NO: 173 - RNA, 20 nt, synthetic construct
  source 1..20: mol_type = other RNA
gcgggtgagtgcggggtcgg

SEQ ID NO: 174 - RNA, 20 nt, synthetic construct
  source 1..20: mol_type = other RNA
gctgggatcatggtagatgg

SEQ ID NO: 175 - RNA, 20 nt, synthetic construct
  source 1..20: mol_type = other RNA
ggaaccctccttttactcct

SEQ ID NO: 176 - RNA, 20 nt, synthetic construct
  source 1..20: mol_type = other RNA
ggactcaagaagttctcagg

SEQ ID NO: 177 - RNA, 20 nt, synthetic construct
  source 1..20: mol_type = other RNA
ggactcagaggctgggatca

SEQ ID NO: 178 - RNA, 20 nt, synthetic construct
  source 1..20: mol_type = other RNA
ggaggccctggcccttaccc

SEQ ID NO: 179 - RNA, 20 nt, synthetic construct
  source 1..20: mol_type = other RNA
ggagggttccatctaccatg

SEQ ID NO: 180 - RNA, 20 nt, synthetic construct
  source 1..20: mol_type = other RNA
ggagtaaaaggagggttcca

SEQ ID NO: 181 - RNA, 20 nt, synthetic construct
  source 1..20: mol_type = other RNA
ggatcatggtagatggaacc

SEQ ID NO: 182 - RNA, 20 nt, synthetic construct
  source 1..20: mol_type = other RNA
ggatggggactttatagtcg

SEQ ID NO: 183 - RNA, 20 nt, synthetic construct
  source 1..20: mol_type = other RNA
ggccagggcctccgagagga

SEQ ID NO: 184 - RNA, 20 nt, synthetic construct
  source 1..20: mol_type = other RNA
ggccctggcccttacccaga

SEQ ID NO: 185 - RNA, 20 nt, synthetic construct
  source 1..20: mol_type = other RNA
ggcccttacccagacctggg

SEQ ID NO: 186 - RNA, 20 nt, synthetic construct
  source 1..20: mol_type = other RNA
ggccgtttccatcccgaccc

SEQ ID NO: 187 - RNA, 20 nt, synthetic construct
  source 1..20: mol_type = other RNA
ggcctccgagaggagtaaaa

SEQ ID NO: 188 - RNA, 20 nt, synthetic construct
  source 1..20: mol_type = other RNA
ggcgggtgagtgcggggtcg

SEQ ID NO: 189 - RNA, 20 nt, synthetic construct
  source 1..20: mol_type = other RNA
ggctgggatcatggtagatg

SEQ ID NO: 190 - RNA, 20 nt, synthetic construct
  source 1..20: mol_type = other RNA
gggactttatagtcgggagt

SEQ ID NO: 191 - RNA, 20 nt, synthetic construct
  source 1..20: mol_type = other RNA
gggatcatggtagatggaac

SEQ ID NO: 192 - RNA, 20 nt, synthetic construct
  source 1..20: mol_type = other RNA
gggccagggcctccgagagg

SEQ ID NO: 193 - RNA, 20 nt, synthetic construct
  source 1..20: mol_type = other RNA
gggcctccgagaggagtaaa

SEQ ID NO: 194 - RNA, 20 nt, synthetic construct
  source 1..20: mol_type = other RNA
gggcgggtgagtgcggggtc

SEQ ID NO: 195 - RNA, 20 nt, synthetic construct
  source 1..20: mol_type = other RNA
ggggactttatagtcgggag

SEQ ID NO: 196 - RNA, 20 nt, synthetic construct
  source 1..20: mol_type = other RNA
ggggtcgggatggaaacggc

SEQ ID NO: 197 - RNA, 20 nt, synthetic construct
  source 1..20: mol_type = other RNA
gggtaagggccagggcctcc

SEQ ID NO: 198 - RNA, 20 nt, synthetic construct
  source 1..20: mol_type = other RNA
gggtcgggatggaaacggcc

SEQ ID NO: 199 - RNA, 20 nt, synthetic construct
  source 1..20: mol_type = other RNA
gggtgagtgcggggtcggga

SEQ ID NO: 200 - RNA, 20 nt, synthetic construct
  source 1..20: mol_type = other RNA
gggttccatctaccatgatc

SEQ ID NO: 201 - RNA, 20 nt, synthetic construct
  source 1..20: mol_type = other RNA
ggtaagggccagggcctccg

SEQ ID NO: 202 - RNA, 20 nt, synthetic construct
  source 1..20: mol_type = other RNA
ggtagaggccgtttccatcc

SEQ ID NO: 203 - RNA, 20 nt, synthetic construct
  source 1..20: mol_type = other RNA
ggtagatggaaccctccttt

SEQ ID NO: 204 - RNA, 20 nt, synthetic construct
  source 1..20: mol_type = other RNA
ggtcgggatggaaacggcct

SEQ ID NO: 205 - RNA, 20 nt, synthetic construct
  source 1..20: mol_type = other RNA
ggtctgggtaagggccaggg

SEQ ID NO: 206 - RNA, 20 nt, synthetic construct
  source 1..20: mol_type = other RNA
ggtgagtgcggggtcgggat

SEQ ID NO: 207 - RNA, 20 nt, synthetic construct
  source 1..20: mol_type = other RNA
ggttccatctaccatgatcc

SEQ ID NO: 208 - RNA, 20 nt, synthetic construct
  source 1..20: mol_type = other RNA
gtaaaaggagggttccatct

SEQ ID NO: 209 - RNA, 20 nt, synthetic construct
  source 1..20: mol_type = other RNA
gtaagggccagggcctccga

SEQ ID NO: 210 - RNA, 20 nt, synthetic construct
  source 1..20: mol_type = other RNA
gtagaggccgtttccatccc

SEQ ID NO: 211 - RNA, 20 nt, synthetic construct
  source 1..20: mol_type = other RNA
gtagatggaaccctcctttt

SEQ ID NO: 212 - RNA, 20 nt, synthetic construct
  source 1..20: mol_type = other RNA
gtccccatccggactcaaga

SEQ ID NO: 213 - RNA, 20 nt, synthetic construct
  source 1..20: mol_type = other RNA
gtccggatggggactttata

SEQ ID NO: 214 - RNA, 20 nt, synthetic construct
  source 1..20: mol_type = other RNA
gtcctgagaacttcttgagt

SEQ ID NO: 215 - RNA, 20 nt, synthetic construct
  source 1..20: mol_type = other RNA
gtctgggtaagggccagggc

SEQ ID NO: 216 - RNA, 20 nt, synthetic construct
  source 1..20: mol_type = other RNA
gtgagtgcggggtcgggatg

SEQ ID NO: 217 - RNA, 20 nt, synthetic construct
  source 1..20: mol_type = other RNA
gtgcggggtcgggatggaaa

SEQ ID NO: 218 - RNA, 20 nt, synthetic construct
  source 1..20: mol_type = other RNA
gttccatctaccatgatccc

SEQ ID NO: 219 - RNA, 20 nt, synthetic construct
  source 1..20: mol_type = other RNA
gttctcaggactcagaggct

SEQ ID NO: 220 - RNA, 20 nt, synthetic construct
  source 1..20: mol_type = other RNA
gtttccatcccgaccccgca

SEQ ID NO: 221 - RNA, 20 nt, synthetic construct
  source 1..20: mol_type = other RNA
taaaaggagggttccatcta

SEQ ID NO: 222 - RNA, 20 nt, synthetic construct
  source 1..20: mol_type = other RNA
taaagtccccatccggactc

SEQ ID NO: 223 - RNA, 20 nt, synthetic construct
  source 1..20: mol_type = other RNA
taagggccagggcctccgag

SEQ ID NO: 224 - RNA, 20 nt, synthetic construct
  source 1..20: mol_type = other RNA
taccatgatcccagcctctg

SEQ ID NO: 225 - RNA, 20 nt, synthetic construct
  source 1..20: mol_type = other RNA
tacccagacctgggcgggtg

SEQ ID NO: 226 - RNA, 20 nt, synthetic construct
  source 1..20: mol_type = other RNA
tactcctctcggaggccctg

SEQ ID NO: 227 - RNA, 20 nt, synthetic construct
  source 1..20: mol_type = other RNA
tagaggccgtttccatcccg

SEQ ID NO: 228 - RNA, 20 nt, synthetic construct
  source 1..20: mol_type = other RNA
tagatggaaccctcctttta

SEQ ID NO: 229 - RNA, 20 nt, synthetic construct
  source 1..20: mol_type = other RNA
tataaagtccccatccggac

SEQ ID NO: 230 - RNA, 20 nt, synthetic construct
  source 1..20: mol_type = other RNA
tcaagaagttctcaggactc

SEQ ID NO: 231 - RNA, 20 nt, synthetic construct
  source 1..20: mol_type = other RNA
tcacccgcccaggtctgggt

SEQ ID NO: 232 - RNA, 20 nt, synthetic construct
  source 1..20: mol_type = other RNA
tcagaggctgggatcatggt

SEQ ID NO: 233 - RNA, 20 nt, synthetic construct
  source 1..20: mol_type = other RNA
tcaggactcagaggctggga

SEQ ID NO: 234 - RNA, 20 nt, synthetic construct
  source 1..20: mol_type = other RNA
tcatggtagatggaaccctc

SEQ ID NO: 235 - RNA, 20 nt, synthetic construct
  source 1..20: mol_type = other RNA
tccatcccgaccccgcactc

SEQ ID NO: 236 - RNA, 20 nt, synthetic construct
  source 1..20: mol_type = other RNA
tccatctaccatgatcccag

SEQ ID NO: 237 - RNA, 20 nt, synthetic construct
  source 1..20: mol_type = other RNA
tcccagcctctgagtcctga

SEQ ID NO: 238 - RNA, 20 nt, synthetic construct
  source 1..20: mol_type = other RNA
tccccatccggactcaagaa

SEQ ID NO: 239 - RNA, 20 nt, synthetic construct
  source 1..20: mol_type = other RNA
tcccgactataaagtcccca

SEQ ID NO: 240 - RNA, 20 nt, synthetic construct
  source 1..20: mol_type = other RNA
tccgagaggagtaaaaggag

SEQ ID NO: 241 - RNA, 20 nt, synthetic construct
  source 1..20: mol_type = other RNA
tccggactcaagaagttctc

SEQ ID NO: 242 - RNA, 20 nt, synthetic construct
  source 1..20: mol_type = other RNA
tccggatggggactttatag

SEQ ID NO: 243 - RNA, 20 nt, synthetic construct
  source 1..20: mol_type = other RNA
tcctctcggaggccctggcc

SEQ ID NO: 244 - RNA, 20 nt, synthetic construct
  source 1..20: mol_type = other RNA
tcctgagaacttcttgagtc

SEQ ID NO: 245 - RNA, 20 nt, synthetic construct
  source 1..20: mol_type = other RNA
tccttttactcctctcggag

SEQ ID NO: 246 - RNA, 20 nt, synthetic construct
  source 1..20: mol_type = other RNA
tcgccacgactcccgactat

SEQ ID NO: 247 - RNA, 20 nt, synthetic construct
  source 1..20: mol_type = other RNA
tcggaggccctggcccttac

SEQ ID NO: 248 - RNA, 20 nt, synthetic construct
  source 1..20: mol_type = other RNA
tctaccatgatcccagcctc

SEQ ID NO: 249 - RNA, 20 nt, synthetic construct
  source 1..20: mol_type = other RNA
tctcaggactcagaggctgg

SEQ ID NO: 250 - RNA, 20 nt, synthetic construct
  source 1..20: mol_type = other RNA
tctcggaggccctggccctt

SEQ ID NO: 251 - RNA, 20 nt, synthetic construct
  source 1..20: mol_type = other RNA
tctgagtcctgagaacttct

SEQ ID NO: 252 - RNA, 20 nt, synthetic construct
  source 1..20: mol_type = other RNA
tctgggtaagggccagggcc

SEQ ID NO: 253 - RNA, 20 nt, synthetic construct
  source 1..20: mol_type = other RNA
tcttgagtccggatggggac

SEQ ID NO: 254 - RNA, 20 nt, synthetic construct
  source 1..20: mol_type = other RNA
tgagaacttcttgagtccgg

SEQ ID NO: 255 - RNA, 20 nt, synthetic construct
  source 1..20: mol_type = other RNA
tgagtccggatggggacttt

SEQ ID NO: 256 - RNA, 20 nt, synthetic construct
  source 1..20: mol_type = other RNA
tgagtcctgagaacttcttg

SEQ ID NO: 257 - RNA, 20 nt, synthetic construct
  source 1..20: mol_type = other RNA
tgagtgcggggtcgggatgg

SEQ ID NO: 258 - RNA, 20 nt, synthetic construct
  source 1..20: mol_type = other RNA
tgatcccagcctctgagtcc

SEQ ID NO: 259 - RNA, 20 nt, synthetic construct
  source 1..20: mol_type = other RNA
tgcggggtcgggatggaaac

SEQ ID NO: 260 - RNA, 20 nt, synthetic construct
  source 1..20: mol_type = other RNA
tggaaccctccttttactcc

SEQ ID NO: 261 - RNA, 20 nt, synthetic construct
  source 1..20: mol_type = other RNA
tggcccttacccagacctgg

SEQ ID NO: 262 - RNA, 20 nt, synthetic construct
  source 1..20: mol_type = other RNA
tgggatcatggtagatggaa

SEQ ID NO: 263 - RNA, 20 nt, synthetic construct
  source 1..20: mol_type = other RNA
tgggcgggtgagtgcggggt

SEQ ID NO: 264 - RNA, 20 nt, synthetic construct
  source 1..20: mol_type = other RNA
tggggactttatagtcggga

SEQ ID NO: 265 - RNA, 20 nt, synthetic construct
  source 1..20: mol_type = other RNA
tgggtaagggccagggcctc

SEQ ID NO: 266 - RNA, 20 nt, synthetic construct
  source 1..20: mol_type = other RNA
tggtagatggaaccctcctt

SEQ ID NO: 267 - RNA, 20 nt, synthetic construct
  source 1..20: mol_type = other RNA
ttacccagacctgggcgggt

SEQ ID NO: 268 - RNA, 20 nt, synthetic construct
  source 1..20: mol_type = other RNA
ttactcctctcggaggccct

SEQ ID NO: 269 - RNA, 20 nt, synthetic construct
  source 1..20: mol_type = other RNA
ttccatcccgaccccgcact

SEQ ID NO: 270 - RNA, 20 nt, synthetic construct
  source 1..20: mol_type = other RNA
ttccatctaccatgatccca

SEQ ID NO: 271 - RNA, 20 nt, synthetic construct
  source 1..20: mol_type = other RNA
ttctcaggactcagaggctg

SEQ ID NO: 272 - RNA, 20 nt, synthetic construct
  source 1..20: mol_type = other RNA
ttcttgagtccggatgggga

SEQ ID NO: 273 - RNA, 20 nt, synthetic construct
  source 1..20: mol_type = other RNA
ttgagtccggatggggactt

SEQ ID NO: 274 - RNA, 20 nt, synthetic construct
  source 1..20: mol_type = other RNA
tttactcctctcggaggccc

SEQ ID NO: 275 - RNA, 20 nt, synthetic construct
  source 1..20: mol_type = other RNA
tttccatcccgaccccgcac

SEQ ID NO: 276 - RNA, 20 nt, synthetic construct
  source 1..20: mol_type = other RNA
ttttactcctctcggaggcc

SEQ ID NO: 277 - RNA, 21 nt, synthetic construct
  source 1..21: mol_type = other RNA
aaaaggagggttccatctacc

SEQ ID NO: 278 - RNA, 21 nt, synthetic construct
  source 1..21: mol_type = other RNA
aaaggagggttccatctacca

SEQ ID NO: 279 - RNA, 21 nt, synthetic construct
  source 1..21: mol_type = other RNA
aaagtccccatccggactcaa

SEQ ID NO: 280 - RNA, 21 nt, synthetic construct
  source 1..21: mol_type = other RNA
aaccctccttttactcctctc

SEQ ID NO: 281 - RNA, 21 nt, synthetic construct
  source 1..21: mol_type = other RNA
aacttcttgagtccggatggg

SEQ ID NO: 282 - RNA, 21 nt, synthetic construct
  source 1..21: mol_type = other RNA
aagaagttctcaggactcaga

SEQ ID NO: 283 - RNA, 21 nt, synthetic construct
  source 1..21: mol_type = other RNA
aaggagggttccatctaccat

SEQ ID NO: 284 - RNA, 21 nt, synthetic construct
  source 1..21: mol_type = other RNA
aagggccagggcctccgagag

SEQ ID NO: 285 - RNA, 21 nt, synthetic construct
  source 1..21: mol_type = other RNA
aagtccccatccggactcaag

SEQ ID NO: 286 - RNA, 21 nt, synthetic construct
  source 1..21: mol_type = other RNA
aagttctcaggactcagaggc

SEQ ID NO: 287 - RNA, 21 nt, synthetic construct
  source 1..21: mol_type = other RNA
accatgatcccagcctctgag

SEQ ID NO: 288 - RNA, 21 nt, synthetic construct
  source 1..21: mol_type = other RNA
acccgcccaggtctgggtaag

SEQ ID NO: 289 - RNA, 21 nt, synthetic construct
  source 1..21: mol_type = other RNA
accctccttttactcctctcg

SEQ ID NO: 290 - RNA, 21 nt, synthetic construct
  source 1..21: mol_type = other RNA
acctgggcgggtgagtgcggg

SEQ ID NO: 291 - RNA, 21 nt, synthetic construct
  source 1..21: mol_type = other RNA
acgactcccgactataaagtc

SEQ ID NO: 292 - RNA, 21 nt, synthetic construct
  source 1..21: mol_type = other RNA
actataaagtccccatccgga

SEQ ID NO: 293 - RNA, 21 nt, synthetic construct
  source 1..21: mol_type = other RNA
actcaagaagttctcaggact

SEQ ID NO: 294 - RNA, 21 nt, synthetic construct
  source 1..21: mol_type = other RNA
actcacccgcccaggtctggg

SEQ ID NO: 295 - RNA, 21 nt, synthetic construct
  source 1..21: mol_type = other RNA
actcagaggctgggatcatgg

SEQ ID NO: 296 - RNA, 21 nt, synthetic construct
  source 1..21: mol_type = other RNA
actcccgactataaagtcccc

SEQ ID NO: 297 - RNA, 21 nt, synthetic construct
  source 1..21: mol_type = other RNA
actcctctcggaggccctggc

SEQ ID NO: 298 - RNA, 21 nt, synthetic construct
  source 1..21: mol_type = other RNA
acttcttgagtccggatgggg

SEQ ID NO: 299 - RNA, 21 nt, synthetic construct
  source 1..21: mol_type = other RNA
agaacttcttgagtccggatg

SEQ ID NO: 300 - RNA, 21 nt, synthetic construct
  source 1..21: mol_type = other RNA
agaagttctcaggactcagag

SEQ ID NO: 301 - RNA, 21 nt, synthetic construct
  source 1..21: mol_type = other RNA
agaggagtaaaaggagggttc

SEQ ID NO: 302 - RNA, 21 nt, synthetic construct
  source 1..21: mol_type = other RNA
agaggccgtttccatcccgac

SEQ ID NO: 303 - RNA, 21 nt, synthetic construct
  source 1..21: mol_type = other RNA
agaggctgggatcatggtaga

SEQ ID NO: 304 - RNA, 21 nt, synthetic construct
  source 1..21: mol_type = other RNA
agatggaaccctccttttact

SEQ ID NO: 305 - RNA, 21 nt, synthetic construct
  source 1..21: mol_type = other RNA
agcctctgagtcctgagaact

SEQ ID NO: 306 - RNA, 21 nt, synthetic construct
  source 1..21: mol_type = other RNA
aggactcagaggctgggatca

SEQ ID NO: 307 - RNA, 21 nt, synthetic construct
  source 1..21: mol_type = other RNA
aggagggttccatctaccatg

SEQ ID NO: 308 - RNA, 21 nt, synthetic construct
  source 1..21: mol_type = other RNA
aggagtaaaaggagggttcca

SEQ ID NO: 309 - RNA, 21 nt, synthetic construct
  source 1..21: mol_type = other RNA
aggccctggcccttacccaga

SEQ ID NO: 310 - RNA, 21 nt, synthetic construct
  source 1..21: mol_type = other RNA
aggccgtttccatcccgaccc

SEQ ID NO: 311 - RNA, 21 nt, synthetic construct
  source 1..21: mol_type = other RNA
aggctgggatcatggtagatg

SEQ ID NO: 312 - RNA, 21 nt, synthetic construct
  source 1..21: mol_type = other RNA
agggccagggcctccgagagg

SEQ ID NO: 313 - RNA, 21 nt, synthetic construct
  source 1..21: mol_type = other RNA
agggcctccgagaggagtaaa

SEQ ID NO: 314 - RNA, 21 nt, synthetic construct
  source 1..21: mol_type = other RNA
agggttccatctaccatgatc

SEQ ID NO: 315 - RNA, 21 nt, synthetic construct
  source 1..21: mol_type = other RNA
aggtctgggtaagggccaggg

SEQ ID NO: 316 - RNA, 21 nt, synthetic construct
  source 1..21: mol_type = other RNA
agtaaaaggagggttccatct

SEQ ID NO: 317 - RNA, 21 nt, synthetic construct
  source 1..21: mol_type = other RNA
agtccccatccggactcaaga

SEQ ID NO: 318 - RNA, 21 nt, synthetic construct
  source 1..21: mol_type = other RNA
agtccggatggggactttata

SEQ ID NO: 319 - RNA, 21 nt, synthetic construct
  source 1..21: mol_type = other RNA
agtcctgagaacttcttgagt

SEQ ID NO: 320 - RNA, 21 nt, synthetic construct
  source 1..21: mol_type = other RNA
agtgcggggtcgggatggaaa

SEQ ID NO: 321 - RNA, 21 nt, synthetic construct
  source 1..21: mol_type = other RNA
agttctcaggactcagaggct

SEQ ID NO: 322 - RNA, 21 nt, synthetic construct
  source 1..21: mol_type = other RNA
ataaagtccccatccggactc

SEQ ID NO: 323 - RNA, 21 nt, synthetic construct
  source 1..21: mol_type = other RNA
atcatggtagatggaaccctc

SEQ ID NO: 324 - RNA, 21 nt, synthetic construct
  source 1..21: mol_type = other RNA
atcccagcctctgagtcctga

SEQ ID NO: 325 - RNA, 21 nt, synthetic construct
  source 1..21: mol_type = other RNA
atcccgaccccgcactcaccc

SEQ ID NO: 326 - RNA, 21 nt, synthetic construct
  source 1..21: mol_type = other RNA
atccggactcaagaagttctc

SEQ ID NO: 327 - RNA, 21 nt, synthetic construct
  source 1..21: mol_type = other RNA
atctaccatgatcccagcctc

SEQ ID NO: 328 - RNA, 21 nt, synthetic construct
  source 1..21: mol_type = other RNA
atgatcccagcctctgagtcc

SEQ ID NO: 329 - RNA, 21 nt, synthetic construct
  source 1..21: mol_type = other RNA
atggaaccctccttttactcc

SEQ ID NO: 330 - RNA, 21 nt, synthetic construct
  source 1..21: mol_type = other RNA
atggggactttatagtcggga

SEQ ID NO: 331 - RNA, 21 nt, synthetic construct
  source 1..21: mol_type = other RNA
atggtagatggaaccctcctt

SEQ ID NO: 332 - RNA, 21 nt, synthetic construct
  source 1..21: mol_type = other RNA
caagaagttctcaggactcag

SEQ ID NO: 333 - RNA, 21 nt, synthetic construct
  source 1..21: mol_type = other RNA
cacccgcccaggtctgggtaa

SEQ ID NO: 334 - RNA, 21 nt, synthetic construct
  source 1..21: mol_type = other RNA
cacgactcccgactataaagt

SEQ ID NO: 335 - RNA, 21 nt, synthetic construct
  source 1..21: mol_type = other RNA
cactcacccgcccaggtctgg

SEQ ID NO: 336 - RNA, 21 nt, synthetic construct
  source 1..21: mol_type = other RNA
cagaggctgggatcatggtag

SEQ ID NO: 337 - RNA, 21 nt, synthetic construct
  source 1..21: mol_type = other RNA
cagcctctgagtcctgagaac

SEQ ID NO: 338 - RNA, 21 nt, synthetic construct
  source 1..21: mol_type = other RNA
caggactcagaggctgggatc

SEQ ID NO: 339 - RNA, 21 nt, synthetic construct
  source 1..21: mol_type = other RNA
cagggcctccgagaggagtaa

SEQ ID NO: 340 - RNA, 21 nt, synthetic construct
  source 1..21: mol_type = other RNA
caggtctgggtaagggccagg

SEQ ID NO: 341 - RNA, 21 nt, synthetic construct
  source 1..21: mol_type = other RNA
catcccgaccccgcactcacc

SEQ ID NO: 342 - RNA, 21 nt, synthetic construct
  source 1..21: mol_type = other RNA
catccggactcaagaagttct

SEQ ID NO: 343 - RNA, 21 nt, synthetic construct
  source 1..21: mol_type = other RNA
catctaccatgatcccagcct

SEQ ID NO: 344 - RNA, 21 nt, synthetic construct
  source 1..21: mol_type = other RNA
catgatcccagcctctgagtc

SEQ ID NO: 345 - RNA, 21 nt, synthetic construct
  source 1..21: mol_type = other RNA
catggtagatggaaccctcct

SEQ ID NO: 346 - RNA, 21 nt, synthetic construct
  source 1..21: mol_type = other RNA
ccacgactcccgactataaag

SEQ ID NO: 347 - RNA, 21 nt, synthetic construct
  source 1..21: mol_type = other RNA
ccagcctctgagtcctgagaa

SEQ ID NO: 348 - RNA, 21 nt, synthetic construct
  source 1..21: mol_type = other RNA
ccagggcctccgagaggagta

SEQ ID NO: 349 - RNA, 21 nt, synthetic construct
  source 1..21: mol_type = other RNA
ccaggtctgggtaagggccag

SEQ ID NO: 350 - RNA, 21 nt, synthetic construct
  source 1..21: mol_type = other RNA
ccatcccgaccccgcactcac

SEQ ID NO: 351 - RNA, 21 nt, synthetic construct
  source 1..21: mol_type = other RNA
ccatccggactcaagaagttc

SEQ ID NO: 352 - RNA, 21 nt, synthetic construct
  source 1..21: mol_type = other RNA
ccatctaccatgatcccagcc

SEQ ID NO: 353 - RNA, 21 nt, synthetic construct
  source 1..21: mol_type = other RNA
ccatgatcccagcctctgagt

SEQ ID NO: 354 - RNA, 21 nt, synthetic construct
  source 1..21: mol_type = other RNA
cccagcctctgagtcctgaga

SEQ ID NO: 355 - RNA, 21 nt, synthetic construct
  source 1..21: mol_type = other RNA
cccaggtctgggtaagggcca

SEQ ID NO: 356 - RNA, 21 nt, synthetic construct
  source 1..21: mol_type = other RNA
cccatccggactcaagaagtt

SEQ ID NO: 357 - RNA, 21 nt, synthetic construct
  source 1..21: mol_type = other RNA
ccccatccggactcaagaagt

SEQ ID NO: 358 - RNA, 21 nt, synthetic construct
  source 1..21: mol_type = other RNA
cccgactataaagtccccatc

SEQ ID NO: 359 - RNA, 21 nt, synthetic construct
  source 1..21: mol_type = other RNA
cccgcactcacccgcccaggt

SEQ ID NO: 360 - RNA, 21 nt, synthetic construct
  source 1..21: mol_type = other RNA
cccgcccaggtctgggtaagg

SEQ ID NO: 361 - RNA, 21 nt, synthetic construct
  source 1..21: mol_type = other RNA
cccggtagaggccgtttccat

SEQ ID NO: 362 - RNA, 21 nt, synthetic construct
  source 1..21: mol_type = other RNA
ccctccttttactcctctcgg

SEQ ID NO: 363 - RNA, 21 nt, synthetic construct
  source 1..21: mol_type = other RNA
ccctggcccttacccagacct

SEQ ID NO: 364 - RNA, 21 nt, synthetic construct
  source 1..21: mol_type = other RNA
cccttacccagacctgggcgg

SEQ ID NO: 365 - RNA, 21 nt, synthetic construct
  source 1..21: mol_type = other RNA
ccgactataaagtccccatcc

SEQ ID NO: 366 - RNA, 21 nt, synthetic construct
  source 1..21: mol_type = other RNA
ccgagaggagtaaaaggaggg

SEQ ID NO: 367 - RNA, 21 nt, synthetic construct
  source 1..21: mol_type = other RNA
ccgcactcacccgcccaggtc

SEQ ID NO: 368 - RNA, 21 nt, synthetic construct
  source 1..21: mol_type = other RNA
ccgcccaggtctgggtaaggg

SEQ ID NO: 369 - RNA, 21 nt, synthetic construct
  source 1..21: mol_type = other RNA
ccggactcaagaagttctcag

SEQ ID NO: 370 - RNA, 21 nt, synthetic construct
  source 1..21: mol_type = other RNA
ccggatggggactttatagtc

SEQ ID NO: 371 - RNA, 21 nt, synthetic construct
  source 1..21: mol_type = other RNA
ccggtagaggccgtttccatc

SEQ ID NO: 372 - RNA, 21 nt, synthetic construct
  source 1..21: mol_type = other RNA
ccgtttccatcccgaccccgc

SEQ ID NO: 373 - RNA, 21 nt, synthetic construct
  source 1..21: mol_type = other RNA
cctccgagaggagtaaaagga

SEQ ID NO: 374 - RNA, 21 nt, synthetic construct
  source 1..21: mol_type = other RNA
cctccttttactcctctcgga

SEQ ID NO: 375 - RNA, 21 nt, synthetic construct
  source 1..21: mol_type = other RNA
cctctcggaggccctggccct

SEQ ID NO: 376 - RNA, 21 nt, synthetic construct
  source 1..21: mol_type = other RNA
cctctgagtcctgagaacttc

SEQ ID NO: 377 - RNA, 21 nt, synthetic construct
  source 1..21: mol_type = other RNA
cctgagaacttcttgagtccg

SEQ ID NO: 378 - RNA, 21 nt, synthetic construct
  source 1..21: mol_type = other RNA
cctggcccttacccagacctg

SEQ ID NO: 379 - RNA, 21 nt, synthetic construct
  source 1..21: mol_type = other RNA
ccttacccagacctgggcggg

SEQ ID NO: 380 - RNA, 21 nt, synthetic construct
  source 1..21: mol_type = other RNA
ccttttactcctctcggaggc

SEQ ID NO: 381 - RNA, 21 nt, synthetic construct
  source 1..21: mol_type = other RNA
cgactataaagtccccatccg

SEQ ID NO: 382 - RNA, 21 nt, synthetic construct
  source 1..21: mol_type = other RNA
cgactcccgactataaagtcc

SEQ ID NO: 383 - RNA, 21 nt, synthetic construct
  source 1..21: mol_type = other RNA
cgagaggagtaaaaggagggt

SEQ ID NO: 384 - RNA, 21 nt, synthetic construct
  source 1..21: mol_type = other RNA
cgcactcacccgcccaggtct

SEQ ID NO: 385 - RNA, 21 nt, synthetic construct
  source 1..21: mol_type = other RNA
cgccacgactcccgactataa

SEQ ID NO: 386 - RNA, 21 nt, synthetic construct
  source 1..21: mol_type = other RNA
cgcccaggtctgggtaagggc

SEQ ID NO: 387 - RNA, 21 nt, synthetic construct
  source 1..21: mol_type = other RNA
cggactcaagaagttctcagg

SEQ ID NO: 388 - RNA, 21 nt, synthetic construct
  source 1..21: mol_type = other RNA
cggaggccctggcccttaccc

SEQ ID NO: 389 - RNA, 21 nt, synthetic construct
  source 1..21: mol_type = other RNA
cggatggggactttatagtcg

SEQ ID NO: 390 - RNA, 21 nt, synthetic construct
  source 1..21: mol_type = other RNA
cggggtcgggatggaaacggc

SEQ ID NO: 391 - RNA, 21 nt, synthetic construct
  source 1..21: mol_type = other RNA
cgggtgagtgcggggtcggga

SEQ ID NO: 392 - RNA, 21 nt, synthetic construct
  source 1..21: mol_type = other RNA
cggtagaggccgtttccatcc

SEQ ID NO: 393 - RNA, 21 nt, synthetic construct
  source 1..21: mol_type = other RNA
cgtttccatcccgaccccgca

SEQ ID NO: 394 - RNA, 21 nt, synthetic construct
  source 1..21: mol_type = other RNA
ctaccatgatcccagcctctg

SEQ ID NO: 395 - RNA, 21 nt, synthetic construct
  source 1..21: mol_type = other RNA
ctataaagtccccatccggac

SEQ ID NO: 396 - RNA, 21 nt, synthetic construct
  source 1..21: mol_type = other RNA
ctcaagaagttctcaggactc

SEQ ID NO: 397 - RNA, 21 nt, synthetic construct
  source 1..21: mol_type = other RNA
ctcacccgcccaggtctgggt

SEQ ID NO: 398 - RNA, 21 nt, synthetic construct
  source 1..21: mol_type = other RNA
ctcagaggctgggatcatggt

SEQ ID NO: 399 - RNA, 21 nt, synthetic construct
  source 1..21: mol_type = other RNA
ctcaggactcagaggctggga

SEQ ID NO: 400 - RNA, 21 nt, synthetic construct
  source 1..21: mol_type = other RNA
ctcccgactataaagtcccca

SEQ ID NO: 401 - RNA, 21 nt, synthetic construct
  source 1..21: mol_type = other RNA
ctccgagaggagtaaaaggag

SEQ ID NO: 402 - RNA, 21 nt, synthetic construct
  source 1..21: mol_type = other RNA
ctcctctcggaggccctggcc

SEQ ID NO: 403 - RNA, 21 nt, synthetic construct
  source 1..21: mol_type = other RNA
ctccttttactcctctcggag

SEQ ID NO: 404 - RNA, 21 nt, synthetic construct
  source 1..21: mol_type = other RNA
ctcggaggccctggcccttac

SEQ ID NO: 405 - RNA, 21 nt, synthetic construct
  source 1..21: mol_type = other RNA
ctctcggaggccctggccctt

SEQ ID NO: 406 - RNA, 21 nt, synthetic construct
  source 1..21: mol_type = other RNA
ctctgagtcctgagaacttct

SEQ ID NO: 407 - RNA, 21 nt, synthetic construct
  source 1..21: mol_type = other RNA
ctgagaacttcttgagtccgg

SEQ ID NO: 408 - RNA, 21 nt, synthetic construct
  source 1..21: mol_type = other RNA
ctgagtcctgagaacttcttg

SEQ ID NO: 409 - RNA, 21 nt, synthetic construct
  source 1..21: mol_type = other RNA
ctggcccttacccagacctgg

SEQ ID NO: 410 - RNA, 21 nt, synthetic construct
  source 1..21: mol_type = other RNA
ctgggatcatggtagatggaa

SEQ ID NO: 411 - RNA, 21 nt, synthetic construct
  source 1..21: mol_type = other RNA
ctgggcgggtgagtgcggggt

SEQ ID NO: 412 - RNA, 21 nt, synthetic construct
  source 1..21: mol_type = other RNA
ctgggtaagggccagggcctc

SEQ ID NO: 413 - RNA, 21 nt, synthetic construct
  source 1..21: mol_type = other RNA
cttacccagacctgggcgggt

SEQ ID NO: 414 - RNA, 21 nt, synthetic construct
  source 1..21: mol_type = other RNA
cttcttgagtccggatgggga

SEQ ID NO: 415 - RNA, 21 nt, synthetic construct
  source 1..21: mol_type = other RNA
cttgagtccggatggggactt

SEQ ID NO: 416 - RNA, 21 nt, synthetic construct
  source 1..21: mol_type = other RNA
cttttactcctctcggaggcc

SEQ ID NO: 417 - RNA, 21 nt, synthetic construct
  source 1..21: mol_type = other RNA
gaaccctccttttactcctct

SEQ ID NO: 418 - RNA, 21 nt, synthetic construct
  source 1..21: mol_type = other RNA
gaacttcttgagtccggatgg

SEQ ID NO: 419 - RNA, 21 nt, synthetic construct
  source 1..21: mol_type = other RNA
gaagttctcaggactcagagg

SEQ ID NO: 420 - RNA, 21 nt, synthetic construct
  source 1..21: mol_type = other RNA
gactataaagtccccatccgg

SEQ ID NO: 421 - RNA, 21 nt, synthetic construct
  source 1..21: mol_type = other RNA
gactcaagaagttctcaggac

SEQ ID NO: 422 - RNA, 21 nt, synthetic construct
  source 1..21: mol_type = other RNA
gactcagaggctgggatcatg

SEQ ID NO: 423 - RNA, 21 nt, synthetic construct
  source 1..21: mol_type = other RNA
gactcccgactataaagtccc

SEQ ID NO: 424 - RNA, 21 nt, synthetic construct
  source 1..21: mol_type = other RNA
gagaacttcttgagtccggat

SEQ ID NO: 425 - RNA, 21 nt, synthetic construct
  source 1..21: mol_type = other RNA
gagaggagtaaaaggagggtt

SEQ ID NO: 426 - RNA, 21 nt, synthetic construct
  source 1..21: mol_type = other RNA
gaggagtaaaaggagggttcc

SEQ ID NO: 427 - RNA, 21 nt, synthetic construct
  source 1..21: mol_type = other RNA
gaggccctggcccttacccag

SEQ ID NO: 428 - RNA, 21 nt, synthetic construct
  source 1..21: mol_type = other RNA
gaggccgtttccatcccgacc

SEQ ID NO: 429 - RNA, 21 nt, synthetic construct
  source 1..21: mol_type = other RNA
gaggctgggatcatggtagat

SEQ ID NO: 430 - RNA, 21 nt, synthetic construct
  source 1..21: mol_type = other RNA
gagggttccatctaccatgat

SEQ ID NO: 431 - RNA, 21 nt, synthetic construct
  source 1..21: mol_type = other RNA
gagtaaaaggagggttccatc

SEQ ID NO: 432 - RNA, 21 nt, synthetic construct
  source 1..21: mol_type = other RNA
gagtccggatggggactttat

SEQ ID NO: 433 - RNA, 21 nt, synthetic construct
  source 1..21: mol_type = other RNA
gagtcctgagaacttcttgag

SEQ ID NO: 434 - RNA, 21 nt, synthetic construct
  source 1..21: mol_type = other RNA
gagtgcggggtcgggatggaa

SEQ ID NO: 435 - RNA, 21 nt, synthetic construct
  source 1..21: mol_type = other RNA
gatcatggtagatggaaccct

SEQ ID NO: 436 - RNA, 21 nt, synthetic construct
  source 1..21: mol_type = other RNA
gatcccagcctctgagtcctg

SEQ ID NO: 437 - RNA, 21 nt, synthetic construct
  source 1..21: mol_type = other RNA
gatggaaccctccttttactc

SEQ ID NO: 438 - RNA, 21 nt, synthetic construct
  source 1..21: mol_type = other RNA
gatggggactttatagtcggg

SEQ ID NO: 439 - RNA, 21 nt, synthetic construct
  source 1..21: mol_type = other RNA
gcactcacccgcccaggtctg

SEQ ID NO: 440 - RNA, 21 nt, synthetic construct
  source 1..21: mol_type = other RNA
gccacgactcccgactataaa

SEQ ID NO: 441 - RNA, 21 nt, synthetic construct
  source 1..21: mol_type = other RNA
gccagggcctccgagaggagt

SEQ ID NO: 442 - RNA, 21 nt, synthetic construct
  source 1..21: mol_type = other RNA
gcccaggtctgggtaagggcc

SEQ ID NO: 443 - RNA, 21 nt, synthetic construct
  source 1..21: mol_type = other RNA
gccctggcccttacccagacc

SEQ ID NO: 444 - RNA, 21 nt, synthetic construct
  source 1..21: mol_type = other RNA
gcccttacccagacctgggcg

SEQ ID NO: 445 - RNA, 21 nt, synthetic construct
  source 1..21: mol_type = other RNA
gccgtttccatcccgaccccg

SEQ ID NO: 446 - RNA, 21 nt, synthetic construct
  source 1..21: mol_type = other RNA
gcctccgagaggagtaaaagg

SEQ ID NO: 447 - RNA, 21 nt, synthetic construct
  source 1..21: mol_type = other RNA
gcctctgagtcctgagaactt

SEQ ID NO: 448 - RNA, 21 nt, synthetic construct
  source 1..21: mol_type = other RNA
gcggggtcgggatggaaacgg

SEQ ID NO: 449 - RNA, 21 nt, synthetic construct
  source 1..21: mol_type = other RNA
gctgggatcatggtagatgga

SEQ ID NO: 450 - RNA, 21 nt, synthetic construct
  source 1..21: mol_type = other RNA
ggaaccctccttttactcctc

SEQ ID NO: 451 - RNA, 21 nt, synthetic construct
  source 1..21: mol_type = other RNA
ggactcaagaagttctcagga

SEQ ID NO: 452 - RNA, 21 nt, synthetic construct
  source 1..21: mol_type = other RNA
ggactcagaggctgggatcat

SEQ ID NO: 453 - RNA, 21 nt, synthetic construct
  source 1..21: mol_type = other RNA
ggaggccctggcccttaccca

SEQ ID NO: 454 - RNA, 21 nt, synthetic construct
  source 1..21: mol_type = other RNA
ggagggttccatctaccatga

SEQ ID NO: 455 - RNA, 21 nt, synthetic construct
  source 1..21: mol_type = other RNA
ggagtaaaaggagggttccat

SEQ ID NO: 456 - RNA, 21 nt, synthetic construct
  source 1..21: mol_type = other RNA
ggatcatggtagatggaaccc

SEQ ID NO: 457 - RNA, 21 nt, synthetic construct
  source 1..21: mol_type = other RNA
ggatggggactttatagtcgg

SEQ ID NO: 458 - RNA, 21 nt, synthetic construct
  source 1..21: mol_type = other RNA
ggccagggcctccgagaggag

SEQ ID NO: 459 - RNA, 21 nt, synthetic construct
  source 1..21: mol_type = other RNA
ggccctggcccttacccagac

SEQ ID NO: 460 - RNA, 21 nt, synthetic construct
  source 1..21: mol_type = other RNA
ggcccttacccagacctgggc

SEQ ID NO: 461 - RNA, 21 nt, synthetic construct
  source 1..21: mol_type = other RNA
ggccgtttccatcccgacccc

SEQ ID NO: 462 - RNA, 21 nt, synthetic construct
  source 1..21: mol_type = other RNA
ggcctccgagaggagtaaaag

SEQ ID NO: 463 - RNA, 21 nt, synthetic construct
  source 1..21: mol_type = other RNA
ggctgggatcatggtagatgg

SEQ ID NO: 464 - RNA, 21 nt, synthetic construct
  source 1..21: mol_type = other RNA
gggatcatggtagatggaacc

SEQ ID NO: 465 - RNA, 21 nt, synthetic construct
  source 1..21: mol_type = other RNA
gggccagggcctccgagagga

SEQ ID NO: 466 - RNA, 21 nt, synthetic construct
  source 1..21: mol_type = other RNA
gggcctccgagaggagtaaaa

SEQ ID NO: 467 - RNA, 21 nt, synthetic construct
  source 1..21: mol_type = other RNA
ggggactttatagtcgggagt

SEQ ID NO: 468 - RNA, 21 nt, synthetic construct
  source 1..21: mol_type = other RNA
ggggtcgggatggaaacggcc

SEQ ID NO: 469 - RNA, 21 nt, synthetic construct
  source 1..21: mol_type = other RNA
gggtaagggccagggcctccg

SEQ ID NO: 470 - RNA, 21 nt, synthetic construct
  source 1..21: mol_type = other RNA
gggtcgggatggaaacggcct

SEQ ID NO: 471 - RNA, 21 nt, synthetic construct
  source 1..21: mol_type = other RNA
gggtgagtgcggggtcgggat

SEQ ID NO: 472 - RNA, 21 nt, synthetic construct
  source 1..21: mol_type = other RNA
gggttccatctaccatgatcc

SEQ ID NO: 473 - RNA, 21 nt, synthetic construct
  source 1..21: mol_type = other RNA
ggtaagggccagggcctccga

SEQ ID NO: 474 - RNA, 21 nt, synthetic construct
  source 1..21: mol_type = other RNA
ggtagaggccgtttccatccc

SEQ ID NO: 475 - RNA, 21 nt, synthetic construct
  source 1..21: mol_type = other RNA
ggtagatggaaccctcctttt

SEQ ID NO: 476 - RNA, 21 nt, synthetic construct
  source 1..21: mol_type = other RNA
ggtctgggtaagggccagggc

SEQ ID NO: 477 - RNA, 21 nt, synthetic construct
  source 1..21: mol_type = other RNA
ggtgagtgcggggtcgggatg

SEQ ID NO: 478 - RNA, 21 nt, synthetic construct
  source 1..21: mol_type = other RNA
ggttccatctaccatgatccc

SEQ ID NO: 479 - RNA, 21 nt, synthetic construct
  source 1..21: mol_type = other RNA
gtaaaaggagggttccatcta

SEQ ID NO: 480 - RNA, 21 nt, synthetic construct
  source 1..21: mol_type = other RNA
gtaagggccagggcctccgag

SEQ ID NO: 481 - RNA, 21 nt, synthetic construct
  source 1..21: mol_type = other RNA
gtagaggccgtttccatcccg

SEQ ID NO: 482 - RNA, 21 nt, synthetic construct
  source 1..21: mol_type = other RNA
gtagatggaaccctcctttta

SEQ ID NO: 483 - RNA, 21 nt, synthetic construct
  source 1..21: mol_type = other RNA
gtccccatccggactcaagaa

SEQ ID NO: 484 - RNA, 21 nt, synthetic construct
  source 1..21: mol_type = other RNA
gtccggatggggactttatag

SEQ ID NO: 485 - RNA, 21 nt, synthetic construct
  source 1..21: mol_type = other RNA
gtcctgagaacttcttgagtc

SEQ ID NO: 486 - RNA, 21 nt, synthetic construct
  source 1..21: mol_type = other RNA
gtctgggtaagggccagggcc

SEQ ID NO: 487 - RNA, 21 nt, synthetic construct
  source 1..21: mol_type = other RNA
gtgagtgcggggtcgggatgg

SEQ ID NO: 488 - RNA, 21 nt, synthetic construct
  source 1..21: mol_type = other RNA
gtgcggggtcgggatggaaac

SEQ ID NO: 489 - RNA, 21 nt, synthetic construct
  source 1..21: mol_type = other RNA
gttccatctaccatgatccca

SEQ ID NO: 490 - RNA, 21 nt, synthetic construct
  source 1..21: mol_type = other RNA
gttctcaggactcagaggctg

SEQ ID NO: 491 - RNA, 21 nt, synthetic construct
  source 1..21: mol_type = other RNA
gtttccatcccgaccccgcac

SEQ ID NO: 492 - RNA, 21 nt, synthetic construct
  source 1..21: mol_type = other RNA
taaaaggagggttccatctac

SEQ ID NO: 493 - RNA, 21 nt, synthetic construct
  source 1..21: mol_type = other RNA
taaagtccccatccggactca

SEQ ID NO: 494 - RNA, 21 nt, synthetic construct
  source 1..21: mol_type = other RNA
taagggccagggcctccgaga

SEQ ID NO: 495 - RNA, 21 nt, synthetic construct
  source 1..21: mol_type = other RNA
taccatgatcccagcctctga

SEQ ID NO: 496 - RNA, 21 nt, synthetic construct
  source 1..21: mol_type = other RNA
tacccagacctgggcgggtga

SEQ ID NO: 497 - RNA, 21 nt, synthetic construct
  source 1..21: mol_type = other RNA
tactcctctcggaggccctgg

SEQ ID NO: 498 - RNA, 21 nt, synthetic construct
  source 1..21: mol_type = other RNA
tagaggccgtttccatcccga

SEQ ID NO: 499 - RNA, 21 nt, synthetic construct
  source 1..21: mol_type = other RNA
tagatggaaccctccttttac

SEQ ID NO: 500 - RNA, 21 nt, synthetic construct
  source 1..21: mol_type = other RNA
tataaagtccccatccggact

SEQ ID NO: 501 - RNA, 21 nt, synthetic construct
  source 1..21: mol_type = other RNA
tcaagaagttctcaggactca

SEQ ID NO: 502 - RNA, 21 nt, synthetic construct
  source 1..21: mol_type = other RNA
tcacccgcccaggtctgggta

SEQ ID NO: 503 - RNA, 21 nt, synthetic construct
  source 1..21: mol_type = other RNA
tcagaggctgggatcatggta

SEQ ID NO: 504 - RNA, 21 nt, synthetic construct
  source 1..21: mol_type = other RNA
tcaggactcagaggctgggat

SEQ ID NO: 505 - RNA, 21 nt, synthetic construct
  source 1..21: mol_type = other RNA
tcatggtagatggaaccctcc

SEQ ID NO: 506 - RNA, 21 nt, synthetic construct
  source 1..21: mol_type = other RNA
tccatcccgaccccgcactca

SEQ ID NO: 507 - RNA, 21 nt, synthetic construct
  source 1..21: mol_type = other RNA
tccatctaccatgatcccagc

SEQ ID NO: 508 - RNA, 21 nt, synthetic construct
  source 1..21: mol_type = other RNA
tcccagcctctgagtcctgag

SEQ ID NO: 509 - RNA, 21 nt, synthetic construct
  source 1..21: mol_type = other RNA
tccccatccggactcaagaag

SEQ ID NO: 510 - RNA, 21 nt, synthetic construct
  source 1..21: mol_type = other RNA
tcccgactataaagtccccat

SEQ ID NO: 511 - RNA, 21 nt, synthetic construct
  source 1..21: mol_type = other RNA
tccgagaggagtaaaaggagg

SEQ ID NO: 512 - RNA, 21 nt, synthetic construct
  source 1..21: mol_type = other RNA
tccggactcaagaagttctca

SEQ ID NO: 513 - RNA, 21 nt, synthetic construct
  source 1..21: mol_type = other RNA
tccggatggggactttatagt

SEQ ID NO: 514 - RNA, 21 nt, synthetic construct
  source 1..21: mol_type = other RNA
tcctctcggaggccctggccc

SEQ ID NO: 515 - RNA, 21 nt, synthetic construct
  source 1..21: mol_type = other RNA
tcctgagaacttcttgagtcc

SEQ ID NO: 516 - RNA, 21 nt, synthetic construct
  source 1..21: mol_type = other RNA
tccttttactcctctcggagg

SEQ ID NO: 517 - RNA, 21 nt, synthetic construct
  source 1..21: mol_type = other RNA
tcgccacgactcccgactata

SEQ ID NO: 518 - RNA, 21 nt, synthetic construct
  source 1..21: mol_type = other RNA
tcggaggccctggcccttacc

SEQ ID NO: 519 - RNA, 21 nt, synthetic construct
  source 1..21: mol_type = other RNA
tctaccatgatcccagcctct

SEQ ID NO: 520 - RNA, 21 nt, synthetic construct
  source 1..21: mol_type = other RNA
tctcaggactcagaggctggg

SEQ ID NO: 521 - RNA, 21 nt, synthetic construct
  source 1..21: mol_type = other RNA
tctcggaggccctggccctta

SEQ ID NO: 522 - RNA, 21 nt, synthetic construct
  source 1..21: mol_type = other RNA
tctgagtcctgagaacttctt

SEQ ID NO: 523 - RNA, 21 nt, synthetic construct
  source 1..21: mol_type = other RNA
tctgggtaagggccagggcct

SEQ ID NO: 524 - RNA, 21 nt, synthetic construct
  source 1..21: mol_type = other RNA
tcttgagtccggatggggact

SEQ ID NO: 525 - RNA, 21 nt, synthetic construct
  source 1..21: mol_type = other RNA
tgagaacttcttgagtccgga

SEQ ID NO: 526 - RNA, 21 nt, synthetic construct
  source 1..21: mol_type = other RNA
tgagtccggatggggacttta

SEQ ID NO: 527 - RNA, 21 nt, synthetic construct
  source 1..21: mol_type = other RNA
tgagtcctgagaacttcttga

SEQ ID NO: 528 - RNA, 21 nt, synthetic construct
  source 1..21: mol_type = other RNA
tgagtgcggggtcgggatgga

SEQ ID NO: 529 - RNA, 21 nt, synthetic construct
  source 1..21: mol_type = other RNA
tgatcccagcctctgagtcct

SEQ ID NO: 530 - RNA, 21 nt, synthetic construct
  source 1..21: mol_type = other RNA
tgcggggtcgggatggaaacg

SEQ ID NO: 531 - RNA, 21 nt, synthetic construct
  source 1..21: mol_type = other RNA
tggaaccctccttttactcct

SEQ ID NO: 532 - RNA, 21 nt, synthetic construct
  source 1..21: mol_type = other RNA
tggcccttacccagacctggg

SEQ ID NO: 533 - RNA, 21 nt, synthetic construct
  source 1..21: mol_type = other RNA
tgggatcatggtagatggaac

SEQ ID NO: 534 - RNA, 21 nt, synthetic construct
  source 1..21: mol_type = other RNA
tgggcgggtgagtgcggggtc

SEQ ID NO: 535 - RNA, 21 nt, synthetic construct
  source 1..21: mol_type = other RNA
tggggactttatagtcgggag

SEQ ID NO: 536 - RNA, 21 nt, synthetic construct
  source 1..21: mol_type = other RNA
tgggtaagggccagggcctcc

SEQ ID NO: 537 - RNA, 21 nt, synthetic construct
  source 1..21: mol_type = other RNA
tggtagatggaaccctccttt

SEQ ID NO: 538 - RNA, 21 nt, synthetic construct
  source 1..21: mol_type = other RNA
ttacccagacctgggcgggtg

SEQ ID NO: 539 - RNA, 21 nt, synthetic construct
  source 1..21: mol_type = other RNA
ttactcctctcggaggccctg

SEQ ID NO: 540 - RNA, 21 nt, synthetic construct
  source 1..21: mol_type = other RNA
ttccatcccgaccccgcactc

SEQ ID NO: 541 - RNA, 21 nt, synthetic construct
  source 1..21: mol_type = other RNA
ttccatctaccatgatcccag

SEQ ID NO: 542 - RNA, 21 nt, synthetic construct
  source 1..21: mol_type = other RNA
ttctcaggactcagaggctgg

SEQ ID NO: 543 - RNA, 21 nt, synthetic construct
  source 1..21: mol_type = other RNA
ttcttgagtccggatggggac

SEQ ID NO: 544 - RNA, 21 nt, synthetic construct
  source 1..21: mol_type = other RNA
ttgagtccggatggggacttt

SEQ ID NO: 545 - RNA, 21 nt, synthetic construct
  source 1..21: mol_type = other RNA
tttactcctctcggaggccct

SEQ ID NO: 546 - RNA, 21 nt, synthetic construct
  source 1..21: mol_type = other RNA
tttccatcccgaccccgcact

SEQ ID NO: 547 - RNA, 21 nt, synthetic construct
  source 1..21: mol_type = other RNA
ttttactcctctcggaggccc

SEQ ID NO: 548 - RNA, 22 nt, synthetic construct
  source 1..22: mol_type = other RNA
aaaaggagggttccatctacca

SEQ ID NO: 549 - RNA, 22 nt, synthetic construct
  source 1..22: mol_type = other RNA
aaaggagggttccatctaccat

SEQ ID NO: 550 - RNA, 22 nt, synthetic construct
  source 1..22: mol_type = other RNA
aaagtccccatccggactcaag

SEQ ID NO: 551 - RNA, 22 nt, synthetic construct
  source 1..22: mol_type = other RNA
aaccctccttttactcctctcg

SEQ ID NO: 552 - RNA, 22 nt, synthetic construct
  source 1..22: mol_type = other RNA
aacttcttgagtccggatgggg

SEQ ID NO: 553 - RNA, 22 nt, synthetic construct
  source 1..22: mol_type = other RNA
aagaagttctcaggactcagag

SEQ ID NO: 554 - RNA, 22 nt, synthetic construct
  source 1..22: mol_type = other RNA
aaggagggttccatctaccatg

SEQ ID NO: 555 - RNA, 22 nt, synthetic construct
  source 1..22: mol_type = other RNA
aagggccagggcctccgagagg

SEQ ID NO: 556 - RNA, 22 nt, synthetic construct
  source 1..22: mol_type = other RNA
aagtccccatccggactcaaga

SEQ ID NO: 557 - RNA, 22 nt, synthetic construct
  source 1..22: mol_type = other RNA
aagttctcaggactcagaggct

SEQ ID NO: 558 - RNA, 22 nt, synthetic construct
  source 1..22: mol_type = other RNA
accatgatcccagcctctgagt

SEQ ID NO: 559 - RNA, 22 nt, synthetic construct
  source 1..22: mol_type = other RNA
accccgcactcacccgcccagg

SEQ ID NO: 560 - RNA, 22 nt, synthetic construct
  source 1..22: mol_type = other RNA
acccgcccaggtctgggtaagg

SEQ ID NO: 561 - RNA, 22 nt, synthetic construct
  source 1..22: mol_type = other RNA
accctccttttactcctctcgg

SEQ ID NO: 562 - RNA, 22 nt, synthetic construct
  source 1..22: mol_type = other RNA
acctgggcgggtgagtgcgggg

SEQ ID NO: 563 - RNA, 22 nt, synthetic construct
  source 1..22: mol_type = other RNA
acgactcccgactataaagtcc

SEQ ID NO: 564 - RNA, 22 nt, synthetic construct
  source 1..22: mol_type = other RNA
actataaagtccccatccggac

SEQ ID NO: 565 - RNA, 22 nt, synthetic construct
  source 1..22: mol_type = other RNA
actcaagaagttctcaggactc

SEQ ID NO: 566 - RNA, 22 nt, synthetic construct
  source 1..22: mol_type = other RNA
actcacccgcccaggtctgggt

SEQ ID NO: 567 - RNA, 22 nt, synthetic construct
  source 1..22: mol_type = other RNA
actcagaggctgggatcatggt

SEQ ID NO: 568 - RNA, 22 nt, synthetic construct
  source 1..22: mol_type = other RNA
actcccgactataaagtcccca

SEQ ID NO: 569 - RNA, 22 nt, synthetic construct
  source 1..22: mol_type = other RNA
actcctctcggaggccctggcc

SEQ ID NO: 570 - RNA, 22 nt, synthetic construct
  source 1..22: mol_type = other RNA
acttcttgagtccggatgggga

SEQ ID NO: 571 - RNA, 22 nt, synthetic construct
  source 1..22: mol_type = other RNA
agaacttcttgagtccggatgg

SEQ ID NO: 572 - RNA, 22 nt, synthetic construct
  source 1..22: mol_type = other RNA
agaagttctcaggactcagagg

SEQ ID NO: 573 - RNA, 22 nt, synthetic construct
  source 1..22: mol_type = other RNA
agaggagtaaaaggagggttcc

SEQ ID NO: 574 - RNA, 22 nt, synthetic construct
  source 1..22: mol_type = other RNA
agaggccgtttccatcccgacc

SEQ ID NO: 575 - RNA, 22 nt, synthetic construct
  source 1..22: mol_type = other RNA
agaggctgggatcatggtagat

SEQ ID NO: 576 - RNA, 22 nt, synthetic construct
  source 1..22: mol_type = other RNA
agatggaaccctccttttactc

SEQ ID NO: 577 - RNA, 22 nt, synthetic construct
  source 1..22: mol_type = other RNA
agcctctgagtcctgagaactt

SEQ ID NO: 578 - RNA, 22 nt, synthetic construct
  source 1..22: mol_type = other RNA
aggactcagaggctgggatcat

SEQ ID NO: 579 - RNA, 22 nt, synthetic construct
  source 1..22: mol_type = other RNA
aggagggttccatctaccatga

SEQ ID NO: 580 - RNA, 22 nt, synthetic construct
  source 1..22: mol_type = other RNA
aggagtaaaaggagggttccat

SEQ ID NO: 581 - RNA, 22 nt, synthetic construct
  source 1..22: mol_type = other RNA
aggccctggcccttacccagac

SEQ ID NO: 582 - RNA, 22 nt, synthetic construct
  source 1..22: mol_type = other RNA
aggccgtttccatcccgacccc

SEQ ID NO: 583 - RNA, 22 nt, synthetic construct
  source 1..22: mol_type = other RNA
aggctgggatcatggtagatgg

SEQ ID NO: 584 - RNA, 22 nt, synthetic construct
  source 1..22: mol_type = other RNA
agggccagggcctccgagagga

SEQ ID NO: 585 - RNA, 22 nt, synthetic construct
  source 1..22: mol_type = other RNA
agggcctccgagaggagtaaaa

SEQ ID NO: 586 - RNA, 22 nt, synthetic construct
  source 1..22: mol_type = other RNA
agggttccatctaccatgatcc

SEQ ID NO: 587 - RNA, 22 nt, synthetic construct
  source 1..22: mol_type = other RNA
aggtctgggtaagggccagggc

SEQ ID NO: 588 - RNA, 22 nt, synthetic construct
  source 1..22: mol_type = other RNA
agtaaaaggagggttccatcta

SEQ ID NO: 589 - RNA, 22 nt, synthetic construct
  source 1..22: mol_type = other RNA
agtccccatccggactcaagaa

SEQ ID NO: 590 - RNA, 22 nt, synthetic construct
  source 1..22: mol_type = other RNA
agtccggatggggactttatag

SEQ ID NO: 591 - RNA, 22 nt, synthetic construct
  source 1..22: mol_type = other RNA
agtcctgagaacttcttgagtc

SEQ ID NO: 592 - RNA, 22 nt, synthetic construct
  source 1..22: mol_type = other RNA
agtgcggggtcgggatggaaac

SEQ ID NO: 593 - RNA, 22 nt, synthetic construct
  source 1..22: mol_type = other RNA
agttctcaggactcagaggctg

SEQ ID NO: 594 - RNA, 22 nt, synthetic construct
  source 1..22: mol_type = other RNA
ataaagtccccatccggactca

SEQ ID NO: 595 - RNA, 22 nt, synthetic construct
  source 1..22: mol_type = other RNA
atcatggtagatggaaccctcc

SEQ ID NO: 596 - RNA, 22 nt, synthetic construct
  source 1..22: mol_type = other RNA
atcccagcctctgagtcctgag

SEQ ID NO: 597 - RNA, 22 nt, synthetic construct
  source 1..22: mol_type = other RNA
atcccgaccccgcactcacccg

SEQ ID NO: 598 - RNA, 22 nt, synthetic construct
  source 1..22: mol_type = other RNA
atccggactcaagaagttctca

SEQ ID NO: 599 - RNA, 22 nt, synthetic construct
  source 1..22: mol_type = other RNA
atctaccatgatcccagcctct

SEQ ID NO: 600 - RNA, 22 nt, synthetic construct
  source 1..22: mol_type = other RNA
atgatcccagcctctgagtcct

SEQ ID NO: 601 - RNA, 22 nt, synthetic construct
  source 1..22: mol_type = other RNA
atggaaccctccttttactcct

SEQ ID NO: 602 - RNA, 22 nt, synthetic construct
  source 1..22: mol_type = other RNA
atggggactttatagtcgggag

SEQ ID NO: 603 - RNA, 22 nt, synthetic construct
  source 1..22: mol_type = other RNA
atggtagatggaaccctccttt

SEQ ID NO: 604 - RNA, 22 nt, synthetic construct
  source 1..22: mol_type = other RNA
caagaagttctcaggactcaga

SEQ ID NO: 605 - RNA, 22 nt, synthetic construct
  source 1..22: mol_type = other RNA
cacccgcccaggtctgggtaag

SEQ ID NO: 606 - RNA, 22 nt, synthetic construct
  source 1..22: mol_type = other RNA
cacgactcccgactataaagtc

SEQ ID NO: 607 - RNA, 22 nt, synthetic construct
  source 1..22: mol_type = other RNA
cactcacccgcccaggtctggg

SEQ ID NO: 608 - RNA, 22 nt, synthetic construct
  source 1..22: mol_type = other RNA
cagaggctgggatcatggtaga

SEQ ID NO: 609 - RNA, 22 nt, synthetic construct
  source 1..22: mol_type = other RNA
cagcctctgagtcctgagaact

SEQ ID NO: 610 - RNA, 22 nt, synthetic construct
  source 1..22: mol_type = other RNA
caggactcagaggctgggatca

SEQ ID NO: 611 - RNA, 22 nt, synthetic construct
  source 1..22: mol_type = other RNA
cagggcctccgagaggagtaaa

SEQ ID NO: 612 - RNA, 22 nt, synthetic construct
  source 1..22: mol_type = other RNA
caggtctgggtaagggccaggg

SEQ ID NO: 613 - RNA, 22 nt, synthetic construct
  source 1..22: mol_type = other RNA
catcccgaccccgcactcaccc

SEQ ID NO: 614 - RNA, 22 nt, synthetic construct
  source 1..22: mol_type = other RNA
catccggactcaagaagttctc

SEQ ID NO: 615 - RNA, 22 nt, synthetic construct
  source 1..22: mol_type = other RNA
catctaccatgatcccagcctc

SEQ ID NO: 616 - RNA, 22 nt, synthetic construct
  source 1..22: mol_type = other RNA
catgatcccagcctctgagtcc

SEQ ID NO: 617 - RNA, 22 nt, synthetic construct
  source 1..22: mol_type = other RNA
catggtagatggaaccctcctt

SEQ ID NO: 618 - RNA, 22 nt, synthetic construct
  source 1..22: mol_type = other RNA
ccacgactcccgactataaagt

SEQ ID NO: 619 - RNA, 22 nt, synthetic construct
  source 1..22: mol_type = other RNA
ccagcctctgagtcctgagaac

SEQ ID NO: 620 - RNA, 22 nt, synthetic construct
  source 1..22: mol_type = other RNA
ccagggcctccgagaggagtaa

SEQ ID NO: 621 - RNA, 22 nt, synthetic construct
  source 1..22: mol_type = other RNA
ccaggtctgggtaagggccagg

SEQ ID NO: 622 - RNA, 22 nt, synthetic construct
  source 1..22: mol_type = other RNA
ccatcccgaccccgcactcacc

SEQ ID NO: 623 - RNA, 22 nt, synthetic construct
  source 1..22: mol_type = other RNA
ccatccggactcaagaagttct

SEQ ID NO: 624 - RNA, 22 nt, synthetic construct
  source 1..22: mol_type = other RNA
ccatctaccatgatcccagcct

SEQ ID NO: 625 - RNA, 22 nt, synthetic construct
  source 1..22: mol_type = other RNA
ccatgatcccagcctctgagtc

SEQ ID NO: 626 - RNA, 22 nt, synthetic construct
  source 1..22: mol_type = other RNA
cccagcctctgagtcctgagaa

SEQ ID NO: 627 - RNA, 22 nt, synthetic construct
  source 1..22: mol_type = other RNA
cccaggtctgggtaagggccag

SEQ ID NO: 628 - RNA, 22 nt, synthetic construct
  source 1..22: mol_type = other RNA
cccatccggactcaagaagttc

SEQ ID NO: 629 - RNA, 22 nt, synthetic construct
  source 1..22: mol_type = other RNA
ccccatccggactcaagaagtt

SEQ ID NO: 630 - RNA, 22 nt, synthetic construct
  source 1..22: mol_type = other RNA
ccccgcactcacccgcccaggt

SEQ ID NO: 631 - RNA, 22 nt, synthetic construct
  source 1..22: mol_type = other RNA
cccgactataaagtccccatcc

SEQ ID NO: 632 - RNA, 22 nt, synthetic construct
  source 1..22: mol_type = other RNA
cccgcactcacccgcccaggtc

SEQ ID NO: 633 - RNA, 22 nt, synthetic construct
  source 1..22: mol_type = other RNA
cccgcccaggtctgggtaaggg

SEQ ID NO: 634 - RNA, 22 nt, synthetic construct
  source 1..22: mol_type = other RNA
cccggtagaggccgtttccatc

SEQ ID NO: 635 - RNA, 22 nt, synthetic construct
  source 1..22: mol_type = other RNA
ccctccttttactcctctcgga

SEQ ID NO: 636 - RNA, 22 nt, synthetic construct
  source 1..22: mol_type = other RNA
ccctggcccttacccagacctg

SEQ ID NO: 637 - RNA, 22 nt, synthetic construct
  source 1..22: mol_type = other RNA
cccttacccagacctgggcggg

SEQ ID NO: 638 - RNA, 22 nt, synthetic construct
  source 1..22: mol_type = other RNA
ccgactataaagtccccatccg

SEQ ID NO: 639 - RNA, 22 nt, synthetic construct
  source 1..22: mol_type = other RNA
ccgagaggagtaaaaggagggt

SEQ ID NO: 640 - RNA, 22 nt, synthetic construct
  source 1..22: mol_type = other RNA
ccgcactcacccgcccaggtct

SEQ ID NO: 641 - RNA, 22 nt, synthetic construct
  source 1..22: mol_type = other RNA
ccgcccaggtctgggtaagggc

SEQ ID NO: 642 - RNA, 22 nt, synthetic construct
  source 1..22: mol_type = other RNA
ccggactcaagaagttctcagg

SEQ ID NO: 643 - RNA, 22 nt, synthetic construct
  source 1..22: mol_type = other RNA
ccggatggggactttatagtcg

SEQ ID NO: 644 - RNA, 22 nt, synthetic construct
  source 1..22: mol_type = other RNA
ccggtagaggccgtttccatcc

SEQ ID NO: 645 - RNA, 22 nt, synthetic construct
  source 1..22: mol_type = other RNA
ccgtttccatcccgaccccgca

SEQ ID NO: 646 - RNA, 22 nt, synthetic construct
  source 1..22: mol_type = other RNA
cctccgagaggagtaaaaggag

SEQ ID NO: 647 - RNA, 22 nt, synthetic construct
  source 1..22: mol_type = other RNA
cctccttttactcctctcggag

SEQ ID NO: 648 - RNA, 22 nt, synthetic construct
  source 1..22: mol_type = other RNA
cctctcggaggccctggccctt

SEQ ID NO: 649 - RNA, 22 nt, synthetic construct
  source 1..22: mol_type = other RNA
cctctgagtcctgagaacttct

SEQ ID NO: 650 - RNA, 22 nt, synthetic construct
  source 1..22: mol_type = other RNA
cctgagaacttcttgagtccgg

SEQ ID NO: 651 - RNA, 22 nt, synthetic construct
  source 1..22: mol_type = other RNA
cctggcccttacccagacctgg

SEQ ID NO: 652 - RNA, 22 nt, synthetic construct
  source 1..22: mol_type = other RNA
cctgggcgggtgagtgcggggt

SEQ ID NO: 653 - RNA, 22 nt, synthetic construct
  source 1..22: mol_type = other RNA
ccttacccagacctgggcgggt

SEQ ID NO: 654 - RNA, 22 nt, synthetic construct
  source 1..22: mol_type = other RNA
ccttttactcctctcggaggcc

SEQ ID NO: 655 - RNA, 22 nt, synthetic construct
  source 1..22: mol_type = other RNA
cgactataaagtccccatccgg

SEQ ID NO: 656 - RNA, 22 nt, synthetic construct
  source 1..22: mol_type = other RNA
cgactcccgactataaagtccc

SEQ ID NO: 657 - RNA, 22 nt, synthetic construct
  source 1..22: mol_type = other RNA
cgagaggagtaaaaggagggtt

SEQ ID NO: 658 - RNA, 22 nt, synthetic construct
  source 1..22: mol_type = other RNA
cgcactcacccgcccaggtctg

SEQ ID NO: 659 - RNA, 22 nt, synthetic construct
  source 1..22: mol_type = other RNA
cgccacgactcccgactataaa

SEQ ID NO: 660 - RNA, 22 nt, synthetic construct
  source 1..22: mol_type = other RNA
cgcccaggtctgggtaagggcc

SEQ ID NO: 661 - RNA, 22 nt, synthetic construct
  source 1..22: mol_type = other RNA
cggactcaagaagttctcagga

SEQ ID NO: 662 - RNA, 22 nt, synthetic construct
  source 1..22: mol_type = other RNA
cggaggccctggcccttaccca

SEQ ID NO: 663 - RNA, 22 nt, synthetic construct
  source 1..22: mol_type = other RNA
cggatggggactttatagtcgg

SEQ ID NO: 664 - RNA, 22 nt, synthetic construct
  source 1..22: mol_type = other RNA
cggggtcgggatggaaacggcc

SEQ ID NO: 665 - RNA, 22 nt, synthetic construct
  source 1..22: mol_type = other RNA
cgggtgagtgcggggtcgggat

SEQ ID NO: 666 - RNA, 22 nt, synthetic construct
  source 1..22: mol_type = other RNA
cggtagaggccgtttccatccc

SEQ ID NO: 667 - RNA, 22 nt, synthetic construct
  source 1..22: mol_type = other RNA
cgtttccatcccgaccccgcac

SEQ ID NO: 668 - RNA, 22 nt, synthetic construct
  source 1..22: mol_type = other RNA
ctaccatgatcccagcctctga

SEQ ID NO: 669 - RNA, 22 nt, synthetic construct
  source 1..22: mol_type = other RNA
ctataaagtccccatccggact

SEQ ID NO: 670 - RNA, 22 nt, synthetic construct
  source 1..22: mol_type = other RNA
ctcaagaagttctcaggactca

SEQ ID NO: 671 - RNA, 22 nt, synthetic construct
  source 1..22: mol_type = other RNA
ctcacccgcccaggtctgggta

SEQ ID NO: 672 - RNA, 22 nt, synthetic construct
  source 1..22: mol_type = other RNA
ctcagaggctgggatcatggta

SEQ ID NO: 673 - RNA, 22 nt, synthetic construct
  source 1..22: mol_type = other RNA
ctcaggactcagaggctgggat

SEQ ID NO: 674 - RNA, 22 nt, synthetic construct
  source 1..22: mol_type = other RNA
ctcccgactataaagtccccat

SEQ ID NO: 675 - RNA, 22 nt, synthetic construct
  source 1..22: mol_type = other RNA
ctccgagaggagtaaaaggagg

SEQ ID NO: 676 - RNA, 22 nt, synthetic construct
  source 1..22: mol_type = other RNA
ctcctctcggaggccctggccc

SEQ ID NO: 677 - RNA, 22 nt, synthetic construct
  source 1..22: mol_type = other RNA
ctccttttactcctctcggagg

SEQ ID NO: 678 - RNA, 22 nt, synthetic construct
  source 1..22: mol_type = other RNA
ctcggaggccctggcccttacc

SEQ ID NO: 679 - RNA, 22 nt, synthetic construct
  source 1..22: mol_type = other RNA
ctctcggaggccctggccctta

SEQ ID NO: 680 - RNA, 22 nt, synthetic construct
  source 1..22: mol_type = other RNA
ctctgagtcctgagaacttctt

SEQ ID NO: 681 - RNA, 22 nt, synthetic construct
  source 1..22: mol_type = other RNA
ctgagaacttcttgagtccgga

SEQ ID NO: 682 - RNA, 22 nt, synthetic construct
  source 1..22: mol_type = other RNA
ctgagtcctgagaacttcttga

SEQ ID NO: 683 - RNA, 22 nt, synthetic construct
  source 1..22: mol_type = other RNA
ctggcccttacccagacctggg

SEQ ID NO: 684 - RNA, 22 nt, synthetic construct
  source 1..22: mol_type = other RNA
ctgggatcatggtagatggaac

SEQ ID NO: 685 - RNA, 22 nt, synthetic construct
  source 1..22: mol_type = other RNA
ctgggcgggtgagtgcggggtc

SEQ ID NO: 686 - RNA, 22 nt, synthetic construct
  source 1..22: mol_type = other RNA
ctgggtaagggccagggcctcc

SEQ ID NO: 687 - RNA, 22 nt, synthetic construct
  source 1..22: mol_type = other RNA
cttacccagacctgggcgggtg

SEQ ID NO: 688 - RNA, 22 nt, synthetic construct
  source 1..22: mol_type = other RNA
cttcttgagtccggatggggac

SEQ ID NO: 689 - RNA, 22 nt, synthetic construct
  source 1..22: mol_type = other RNA
cttgagtccggatggggacttt

SEQ ID NO: 690 - RNA, 22 nt, synthetic construct
  source 1..22: mol_type = other RNA
cttttactcctctcggaggccc

SEQ ID NO: 691 - RNA, 22 nt, synthetic construct
  source 1..22: mol_type = other RNA
gaaccctccttttactcctctc

SEQ ID NO: 692 - RNA, 22 nt, synthetic construct
  source 1..22: mol_type = other RNA
gaacttcttgagtccggatggg

SEQ ID NO: 693 - RNA, 22 nt, synthetic construct
  source 1..22: mol_type = other RNA
gaagttctcaggactcagaggc

SEQ ID NO: 694 - RNA, 22 nt, synthetic construct
  source 1..22: mol_type = other RNA
gacctgggcgggtgagtgcggg

SEQ ID NO: 695 - RNA, 22 nt, synthetic construct
  source 1..22: mol_type = other RNA
gactataaagtccccatccgga

SEQ ID NO: 696 - RNA, 22 nt, synthetic construct
  source 1..22: mol_type = other RNA
gactcaagaagttctcaggact

SEQ ID NO: 697 - RNA, 22 nt, synthetic construct
  source 1..22: mol_type = other RNA
gactcagaggctgggatcatgg

SEQ ID NO: 698 - RNA, 22 nt, synthetic construct
  source 1..22: mol_type = other RNA
gactcccgactataaagtcccc

SEQ ID NO: 699 - RNA, 22 nt, synthetic construct
  source 1..22: mol_type = other RNA
gagaacttcttgagtccggatg

SEQ ID NO: 700 - RNA, 22 nt, synthetic construct
  source 1..22: mol_type = other RNA
gagaggagtaaaaggagggttc

SEQ ID NO: 701 - RNA, 22 nt, synthetic construct
  source 1..22: mol_type = other RNA
gaggagtaaaaggagggttcca

SEQ ID NO: 702 - RNA, 22 nt, synthetic construct
  source 1..22: mol_type = other RNA
gaggccctggcccttacccaga

SEQ ID NO: 703 - RNA, 22 nt, synthetic construct
  source 1..22: mol_type = other RNA
gaggccgtttccatcccgaccc

SEQ ID NO: 704 - RNA, 22 nt, synthetic construct
  source 1..22: mol_type = other RNA
gaggctgggatcatggtagatg

SEQ ID NO: 705 - RNA, 22 nt, synthetic construct
  source 1..22: mol_type = other RNA
gagggttccatctaccatgatc

SEQ ID NO: 706 - RNA, 22 nt, synthetic construct
  source 1..22: mol_type = other RNA
gagtaaaaggagggttccatct

SEQ ID NO: 707 - RNA, 22 nt, synthetic construct
  source 1..22: mol_type = other RNA
gagtccggatggggactttata

SEQ ID NO: 708 - RNA, 22 nt, synthetic construct
  source 1..22: mol_type = other RNA
gagtcctgagaacttcttgagt

SEQ ID NO: 709 - RNA, 22 nt, synthetic construct
  source 1..22: mol_type = other RNA
gagtgcggggtcgggatggaaa

SEQ ID NO: 710 - RNA, 22 nt, synthetic construct
  source 1..22: mol_type = other RNA
gatcatggtagatggaaccctc

SEQ ID NO: 711 - RNA, 22 nt, synthetic construct
  source 1..22: mol_type = other RNA
gatcccagcctctgagtcctga

SEQ ID NO: 712 - RNA, 22 nt, synthetic construct
  source 1..22: mol_type = other RNA
gatggaaccctccttttactcc

SEQ ID NO: 713 - RNA, 22 nt, synthetic construct
  source 1..22: mol_type = other RNA
gatggggactttatagtcggga

SEQ ID NO: 714 - RNA, 22 nt, synthetic construct
  source 1..22: mol_type = other RNA
gcactcacccgcccaggtctgg

SEQ ID NO: 715 - RNA, 22 nt, synthetic construct
  source 1..22: mol_type = other RNA
gccacgactcccgactataaag

SEQ ID NO: 716 - RNA, 22 nt, synthetic construct
  source 1..22: mol_type = other RNA
gccagggcctccgagaggagta

SEQ ID NO: 717 - RNA, 22 nt, synthetic construct
  source 1..22: mol_type = other RNA
gcccaggtctgggtaagggcca

SEQ ID NO: 718 - RNA, 22 nt, synthetic construct
  source 1..22: mol_type = other RNA
gccctggcccttacccagacct

SEQ ID NO: 719 - RNA, 22 nt, synthetic construct
  source 1..22: mol_type = other RNA
gcccttacccagacctgggcgg

SEQ ID NO: 720 - RNA, 22 nt, synthetic construct
  source 1..22: mol_type = other RNA
gccgtttccatcccgaccccgc

SEQ ID NO: 721 - RNA, 22 nt, synthetic construct
  source 1..22: mol_type = other RNA
gcctccgagaggagtaaaagga

SEQ ID NO: 722 - RNA, 22 nt, synthetic construct
  source 1..22: mol_type = other RNA
gcctctgagtcctgagaacttc

SEQ ID NO: 723 - RNA, 22 nt, synthetic construct
  source 1..22: mol_type = other RNA
gcggggtcgggatggaaacggc

SEQ ID NO: 724 - RNA, 22 nt, synthetic construct
  source 1..22: mol_type = other RNA
gcgggtgagtgcggggtcggga

SEQ ID NO: 725 - RNA, 22 nt, synthetic construct
  source 1..22: mol_type = other RNA
gctgggatcatggtagatggaa

SEQ ID NO: 726 - RNA, 22 nt, synthetic construct
  source 1..22: mol_type = other RNA
ggaaccctccttttactcctct

SEQ ID NO: 727 - RNA, 22 nt, synthetic construct
  source 1..22: mol_type = other RNA
ggactcaagaagttctcaggac

SEQ ID NO: 728 - RNA, 22 nt, synthetic construct
  source 1..22: mol_type = other RNA
ggactcagaggctgggatcatg

SEQ ID NO: 729 - RNA, 22 nt, synthetic construct
  source 1..22: mol_type = other RNA
ggaggccctggcccttacccag

SEQ ID NO: 730 - RNA, 22 nt, synthetic construct
  source 1..22: mol_type = other RNA
ggagggttccatctaccatgat

SEQ ID NO: 731 - RNA, 22 nt, synthetic construct
  source 1..22: mol_type = other RNA
ggagtaaaaggagggttccatc

SEQ ID NO: 732 - RNA, 22 nt, synthetic construct
  source 1..22: mol_type = other RNA
ggatcatggtagatggaaccct

SEQ ID NO: 733 - RNA, 22 nt, synthetic construct
  source 1..22: mol_type = other RNA
ggatggggactttatagtcggg

SEQ ID NO: 734 - RNA, 22 nt, synthetic construct
  source 1..22: mol_type = other RNA
ggccagggcctccgagaggagt

SEQ ID NO: 735 - RNA, 22 nt, synthetic construct
  source 1..22: mol_type = other RNA
ggccctggcccttacccagacc

SEQ ID NO: 736 - RNA, 22 nt, synthetic construct
  source 1..22: mol_type = other RNA
ggcccttacccagacctgggcg

SEQ ID NO: 737 - RNA, 22 nt, synthetic construct
  source 1..22: mol_type = other RNA
ggccgtttccatcccgaccccg

SEQ ID NO: 738 - RNA, 22 nt, synthetic construct
  source 1..22: mol_type = other RNA
ggcctccgagaggagtaaaagg

SEQ ID NO: 739 - RNA, 22 nt, synthetic construct
  source 1..22: mol_type = other RNA
ggctgggatcatggtagatgga

SEQ ID NO: 740 - RNA, 22 nt, synthetic construct
  source 1..22: mol_type = other RNA
gggatcatggtagatggaaccc

SEQ ID NO: 741 - RNA, 22 nt, synthetic construct
  source 1..22: mol_type = other RNA
gggccagggcctccgagaggag

SEQ ID NO: 742 - RNA, 22 nt, synthetic construct
  source 1..22: mol_type = other RNA
gggcctccgagaggagtaaaag

SEQ ID NO: 743 - RNA, 22 nt, synthetic construct
  source 1..22: mol_type = other RNA
ggggtcgggatggaaacggcct

SEQ ID NO: 744 - RNA, 22 nt, synthetic construct
  source 1..22: mol_type = other RNA
gggtaagggccagggcctccga

SEQ ID NO: 745 - RNA, 22 nt, synthetic construct
  source 1..22: mol_type = other RNA
gggtgagtgcggggtcgggatg

SEQ ID NO: 746 - RNA, 22 nt, synthetic construct
  source 1..22: mol_type = other RNA
gggttccatctaccatgatccc

SEQ ID NO: 747 - RNA, 22 nt, synthetic construct
  source 1..22: mol_type = other RNA
ggtaagggccagggcctccgag

SEQ ID NO: 748 - RNA, 22 nt, synthetic construct
  source 1..22: mol_type = other RNA
ggtagaggccgtttccatcccg

SEQ ID NO: 749 - RNA, 22 nt, synthetic construct
  source 1..22: mol_type = other RNA
ggtagatggaaccctcctttta

SEQ ID NO: 750 - RNA, 22 nt, synthetic construct
  source 1..22: mol_type = other RNA
ggtctgggtaagggccagggcc

SEQ ID NO: 751 - RNA, 22 nt, synthetic construct
  source 1..22: mol_type = other RNA
ggtgagtgcggggtcgggatgg

SEQ ID NO: 752 - RNA, 22 nt, synthetic construct
  source 1..22: mol_type = other RNA
ggttccatctaccatgatccca

SEQ ID NO: 753 - RNA, 22 nt, synthetic construct
  source 1..22: mol_type = other RNA
gtaaaaggagggttccatctac

SEQ ID NO: 754 - RNA, 22 nt, synthetic construct
  source 1..22: mol_type = other RNA
gtaagggccagggcctccgaga

SEQ ID NO: 755 - RNA, 22 nt, synthetic construct
  source 1..22: mol_type = other RNA
gtagaggccgtttccatcccga

SEQ ID NO: 756 - RNA, 22 nt, synthetic construct
  source 1..22: mol_type = other RNA
gtagatggaaccctccttttac

SEQ ID NO: 757 - RNA, 22 nt, synthetic construct
  source 1..22: mol_type = other RNA
gtccccatccggactcaagaag

SEQ ID NO: 758 - RNA, 22 nt, synthetic construct
  source 1..22: mol_type = other RNA
gtccggatggggactttatagt

SEQ ID NO: 759 - RNA, 22 nt, synthetic construct
  source 1..22: mol_type = other RNA
gtcctgagaacttcttgagtcc

SEQ ID NO: 760 - RNA, 22 nt, synthetic construct
  source 1..22: mol_type = other RNA
gtctgggtaagggccagggcct

SEQ ID NO: 761 - RNA, 22 nt, synthetic construct
  source 1..22: mol_type = other RNA
gtgagtgcggggtcgggatgga

SEQ ID NO: 762 - RNA, 22 nt, synthetic construct
  source 1..22: mol_type = other RNA
gtgcggggtcgggatggaaacg

SEQ ID NO: 763 - RNA, 22 nt, synthetic construct
  source 1..22: mol_type = other RNA
gttccatctaccatgatcccag

SEQ ID NO: 764 - RNA, 22 nt, synthetic construct
  source 1..22: mol_type = other RNA
gttctcaggactcagaggctgg

SEQ ID NO: 765 - RNA, 22 nt, synthetic construct
  source 1..22: mol_type = other RNA
gtttccatcccgaccccgcact

SEQ ID NO: 766 - RNA, 22 nt, synthetic construct
  source 1..22: mol_type = other RNA
taaaaggagggttccatctacc

SEQ ID NO: 767 - RNA, 22 nt, synthetic construct
  source 1..22: mol_type = other RNA
taaagtccccatccggactcaa

SEQ ID NO: 768 - RNA, 22 nt, synthetic construct
  source 1..22: mol_type = other RNA
taagggccagggcctccgagag

SEQ ID NO: 769 - RNA, 22 nt, synthetic construct
  source 1..22: mol_type = other RNA
taccatgatcccagcctctgag

SEQ ID NO: 770 - RNA, 22 nt, synthetic construct
  source 1..22: mol_type = other RNA
tacccagacctgggcgggtgag

SEQ ID NO: 771 - RNA, 22 nt, synthetic construct
  source 1..22: mol_type = other RNA
tactcctctcggaggccctggc

SEQ ID NO: 772 - RNA, 22 nt, synthetic construct
  source 1..22: mol_type = other RNA
tagaggccgtttccatcccgac

SEQ ID NO: 773 - RNA, 22 nt, synthetic construct
  source 1..22: mol_type = other RNA
tagatggaaccctccttttact

SEQ ID NO: 774 - RNA, 22 nt, synthetic construct
  source 1..22: mol_type = other RNA
tataaagtccccatccggactc

SEQ ID NO: 775 - RNA, 22 nt, synthetic construct
  source 1..22: mol_type = other RNA
tcaagaagttctcaggactcag

SEQ ID NO: 776 - RNA, 22 nt, synthetic construct
  source 1..22: mol_type = other RNA
tcacccgcccaggtctgggtaa

SEQ ID NO: 777 - RNA, 22 nt, synthetic construct
  source 1..22: mol_type = other RNA
tcagaggctgggatcatggtag

SEQ ID NO: 778 - RNA, 22 nt, synthetic construct
  source 1..22: mol_type = other RNA
tcaggactcagaggctgggatc

SEQ ID NO: 779 - RNA, 22 nt, synthetic construct
  source 1..22: mol_type = other RNA
tcatggtagatggaaccctcct

SEQ ID NO: 780 - RNA, 22 nt, synthetic construct
  source 1..22: mol_type = other RNA
tccatcccgaccccgcactcac

SEQ ID NO: 781 - RNA, 22 nt, synthetic construct
  source 1..22: mol_type = other RNA
tccatctaccatgatcccagcc

SEQ ID NO: 782 - RNA, 22 nt, synthetic construct
  source 1..22: mol_type = other RNA
tcccagcctctgagtcctgaga

SEQ ID NO: 783 - RNA, 22 nt, synthetic construct
  source 1..22: mol_type = other RNA
tccccatccggactcaagaagt

SEQ ID NO: 784 - RNA, 22 nt, synthetic construct
  source 1..22: mol_type = other RNA
tcccgactataaagtccccatc

SEQ ID NO: 785 - RNA, 22 nt, synthetic construct
  source 1..22: mol_type = other RNA
tccgagaggagtaaaaggaggg

SEQ ID NO: 786 - RNA, 22 nt, synthetic construct
  source 1..22: mol_type = other RNA
tccggactcaagaagttctcag

SEQ ID NO: 787 - RNA, 22 nt, synthetic construct
  source 1..22: mol_type = other RNA
tccggatggggactttatagtc

SEQ ID NO: 788 - RNA, 22 nt, synthetic construct
  source 1..22: mol_type = other RNA
tcctctcggaggccctggccct

SEQ ID NO: 789 - RNA, 22 nt, synthetic construct
  source 1..22: mol_type = other RNA
tcctgagaacttcttgagtccg

SEQ ID NO: 790 - RNA, 22 nt, synthetic construct
  source 1..22: mol_type = other RNA
tccttttactcctctcggaggc

SEQ ID NO: 791 - RNA, 22 nt, synthetic construct
  source 1..22: mol_type = other RNA
tcgccacgactcccgactataa

SEQ ID NO: 792 - RNA, 22 nt, synthetic construct
  source 1..22: mol_type = other RNA
tcggaggccctggcccttaccc

SEQ ID NO: 793 - RNA, 22 nt, synthetic construct
  source 1..22: mol_type = other RNA
tctaccatgatcccagcctctg

SEQ ID NO: 794 - RNA, 22 nt, synthetic construct
  source 1..22: mol_type = other RNA
tctcaggactcagaggctggga

SEQ ID NO: 795 - RNA, 22 nt, synthetic construct
  source 1..22: mol_type = other RNA
tctcggaggccctggcccttac

SEQ ID NO: 796 - RNA, 22 nt, synthetic construct
  source 1..22: mol_type = other RNA
tctgagtcctgagaacttcttg

SEQ ID NO: 797 - RNA, 22 nt, synthetic construct
  source 1..22: mol_type = other RNA
tctgggtaagggccagggcctc

SEQ ID NO: 798 - RNA, 22 nt, synthetic construct
  source 1..22: mol_type = other RNA
tcttgagtccggatggggactt

SEQ ID NO: 799 - RNA, 22 nt, synthetic construct
  source 1..22: mol_type = other RNA
tgagaacttcttgagtccggat

SEQ ID NO: 800 - RNA, 22 nt, synthetic construct
  source 1..22: mol_type = other RNA
tgagtccggatggggactttat

SEQ ID NO: 801 - RNA, 22 nt, synthetic construct
  source 1..22: mol_type = other RNA
tgagtcctgagaacttcttgag

SEQ ID NO: 802 - RNA, 22 nt, synthetic construct
  source 1..22: mol_type = other RNA
tgagtgcggggtcgggatggaa

SEQ ID NO: 803 - RNA, 22 nt, synthetic construct
  source 1..22: mol_type = other RNA
tgatcccagcctctgagtcctg

SEQ ID NO: 804 - RNA, 22 nt, synthetic construct
  source 1..22: mol_type = other RNA
tgcggggtcgggatggaaacgg

SEQ ID NO: 805 - RNA, 22 nt, synthetic construct
  source 1..22: mol_type = other RNA
tggaaccctccttttactcctc

SEQ ID NO: 806 - RNA, 22 nt, synthetic construct
  source 1..22: mol_type = other RNA
tggcccttacccagacctgggc

SEQ ID NO: 807 - RNA, 22 nt, synthetic construct
  source 1..22: mol_type = other RNA
tgggatcatggtagatggaacc

SEQ ID NO: 808 - RNA, 22 nt, synthetic construct
  source 1..22: mol_type = other RNA
tgggcgggtgagtgcggggtcg

SEQ ID NO: 809 - RNA, 22 nt, synthetic construct
  source 1..22: mol_type = other RNA
tggggactttatagtcgggagt

SEQ ID NO: 810 - RNA, 22 nt, synthetic construct
  source 1..22: mol_type = other RNA
tgggtaagggccagggcctccg

SEQ ID NO: 811 - RNA, 22 nt, synthetic construct
  source 1..22: mol_type = other RNA
tggtagatggaaccctcctttt

SEQ ID NO: 812 - RNA, 22 nt, synthetic construct
  source 1..22: mol_type = other RNA
ttacccagacctgggcgggtga

SEQ ID NO: 813 - RNA, 22 nt, synthetic construct
  source 1..22: mol_type = other RNA
ttactcctctcggaggccctgg

SEQ ID NO: 814 - RNA, 22 nt, synthetic construct
  source 1..22: mol_type = other RNA
ttccatcccgaccccgcactca

SEQ ID NO: 815 - RNA, 22 nt, synthetic construct
  source 1..22: mol_type = other RNA
ttccatctaccatgatcccagc

SEQ ID NO: 816 - RNA, 22 nt, synthetic construct
  source 1..22: mol_type = other RNA
ttctcaggactcagaggctggg

SEQ ID NO: 817 - RNA, 22 nt, synthetic construct
  source 1..22: mol_type = other RNA
ttcttgagtccggatggggact

SEQ ID NO: 818 - RNA, 22 nt, synthetic construct
  source 1..22: mol_type = other RNA
ttgagtccggatggggacttta

SEQ ID NO: 819 - RNA, 22 nt, synthetic construct
  source 1..22: mol_type = other RNA
tttactcctctcggaggccctg

SEQ ID NO: 820 - RNA, 22 nt, synthetic construct
  source 1..22: mol_type = other RNA
tttccatcccgaccccgcactc

SEQ ID NO: 821 - RNA, 22 nt, synthetic construct
  source 1..22: mol_type = other RNA
ttttactcctctcggaggccct

SEQ ID NO: 822 - RNA, 20 nt, synthetic construct
  source 1..20: mol_type = other RNA
aaaatctgtgcggtgtccct

SEQ ID NO: 823 - RNA, 20 nt, synthetic construct
  source 1..20: mol_type = other RNA
aaatacttcaaggagtggga

SEQ ID NO: 824 - RNA, 20 nt, synthetic construct
  source 1..20: mol_type = other RNA
aaatctgtgcggtgtccctg

SEQ ID NO: 825 - RNA, 20 nt, synthetic construct
  source 1..20: mol_type = other RNA
aacgacgccgcgagtccgag

SEQ ID NO: 826 - RNA, 20 nt, synthetic construct
  source 1..20: mol_type = other RNA
aactgggtgtcgtccacgta

SEQ ID NO: 827 - RNA, 20 nt, synthetic construct
  source 1..20: mol_type = other RNA
aagcgcacgaactgggtgtc

SEQ ID NO: 828 - RNA, 20 nt, synthetic construct
  source 1..20: mol_type = other RNA
aaggactcggggagccgcgc

SEQ ID NO: 829 - RNA, 20 nt, synthetic construct
  source 1..20: mol_type = other RNA
aagtatttccacacttccgt

SEQ ID NO: 830 - RNA, 20 nt, synthetic construct
  source 1..20: mol_type = other RNA
aagtgtggaaatacttcaag

SEQ ID NO: 831 - RNA, 20 nt, synthetic construct
  source 1..20: mol_type = other RNA
aatactctgacccctcctgc

SEQ ID NO: 832 - RNA, 20 nt, synthetic construct
  source 1..20: mol_type = other RNA
aatacttcaaggagtgggag

SEQ ID NO: 833 - RNA, 20 nt, synthetic construct
  source 1..20: mol_type = other RNA
aatcagagcgaggccggtga

SEQ ID NO: 834 - RNA, 20 nt, synthetic construct
  source 1..20: mol_type = other RNA
aatctgcggacgctgcgcgg

SEQ ID NO: 835 - RNA, 20 nt, synthetic construct
  source 1..20: mol_type = other RNA
aatctgtgcggtgtccctgg

SEQ ID NO: 836 - RNA, 20 nt, synthetic construct
  source 1..20: mol_type = other RNA
acaacgacgccgcgagtccg

SEQ ID NO: 837 - RNA, 20 nt, synthetic construct
  source 1..20: mol_type = other RNA
acaatcagagcgaggccggt

SEQ ID NO: 838 - RNA, 20 nt, synthetic construct
  source 1..20: mol_type = other RNA
acacccagttcgtgcgcttc

SEQ ID NO: 839 - RNA, 20 nt, synthetic construct
  source 1..20: mol_type = other RNA
acaccgcacagattttccga

SEQ ID NO: 840 - RNA, 20 nt, synthetic construct
  source 1..20: mol_type = other RNA
acacggaagtgtggaaatac

SEQ ID NO: 841 - RNA, 20 nt, synthetic construct
  source 1..20: mol_type = other RNA
acacggagcgccagggacac

SEQ ID NO: 842 - RNA, 20 nt, synthetic construct
  source 1..20: mol_type = other RNA
acacttccgtgtcccggccc

SEQ ID NO: 843 - RNA, 20 nt, synthetic construct
  source 1..20: mol_type = other RNA
acagagatgaagcggggctc

SEQ ID NO: 844 - RNA, 20 nt, synthetic construct
  source 1..20: mol_type = other RNA
acagattttccgagtgaatc

SEQ ID NO: 845 - RNA, 20 nt, synthetic construct
  source 1..20: mol_type = other RNA
accatcctcggactcgcggc

SEQ ID NO: 846 - RNA, 20 nt, synthetic construct
  source 1..20: mol_type = other RNA
acccagttcgtgcgcttcga

SEQ ID NO: 847 - RNA, 20 nt, synthetic construct
  source 1..20: mol_type = other RNA
accccggccaggggagcagg

SEQ ID NO: 848 - RNA, 20 nt, synthetic construct
  source 1..20: mol_type = other RNA
acccctcctgctccatccac

SEQ ID NO: 849 - RNA, 20 nt, synthetic construct
  source 1..20: mol_type = other RNA
accctcctcccggcgcggct

SEQ ID NO: 850 - RNA, 20 nt, synthetic construct
  source 1..20: mol_type = other RNA
accgcacagattttccgagt

SEQ ID NO: 851 - RNA, 20 nt, synthetic construct
  source 1..20: mol_type = other RNA
accggcctcgctctgattgt

SEQ ID NO: 852 - RNA, 20 nt, synthetic construct
  source 1..20: mol_type = other RNA
accgggagacacggagcgcc

SEQ ID NO: 853 - RNA, 20 nt, synthetic construct
  source 1..20: mol_type = other RNA
acctgctcccctggccgggg

SEQ ID NO: 854 - RNA, 20 nt, synthetic construct
  source 1..20: mol_type = other RNA
acgacacccagttcgtgcgc

SEQ ID NO: 855 - RNA, 20 nt, synthetic construct
  source 1..20: mol_type = other RNA
acgacgccgcgagtccgagg

SEQ ID NO: 856 - RNA, 20 nt, synthetic construct
  source 1..20: mol_type = other RNA
acgccgcgagtccgaggatg

SEQ ID NO: 857 - RNA, 20 nt, synthetic construct
  source 1..20: mol_type = other RNA
acgctgcgcggctactacaa

SEQ ID NO: 858 - RNA, 20 nt, synthetic construct
  source 1..20: mol_type = other RNA
acggaagtgtggaaatactt

SEQ ID NO: 859 - RNA, 20 nt, synthetic construct
  source 1..20: mol_type = other RNA
acggagcgccagggacaccg

SEQ ID NO: 860 - RNA, 20 nt, synthetic construct
  source 1..20: mol_type = other RNA
acggcgcccgcggcaccatc

SEQ ID NO: 861 - RNA, 20 nt, synthetic construct
  source 1..20: mol_type = other RNA
acgtagcccacagagatgaa

SEQ ID NO: 862 - RNA, 20 nt, synthetic construct
  source 1..20: mol_type = other RNA
acgtggacgacacccagttc

SEQ ID NO: 863 - RNA, 20 nt, synthetic construct
  source 1..20: mol_type = other RNA
actacaatcagagcgaggcc

SEQ ID NO: 864 - RNA, 20 nt, synthetic construct
  source 1..20: mol_type = other RNA
actcaccggcctcgctctga

SEQ ID NO: 865 - RNA, 20 nt, synthetic construct
  source 1..20: mol_type = other RNA
actccttgaagtatttccac

SEQ ID NO: 866 - RNA, 20 nt, synthetic construct
  source 1..20: mol_type = other RNA
actcgcggcgtcgttgtcga

SEQ ID NO: 867 - RNA, 20 nt, synthetic construct
  source 1..20: mol_type = other RNA
actcggaaaatctgtgcggt

SEQ ID NO: 868 - RNA, 20 nt, synthetic construct
  source 1..20: mol_type = other RNA
actctgacccctcctgctcc

SEQ ID NO: 869 - RNA, 20 nt, synthetic construct
  source 1..20: mol_type = other RNA
actgggtgtcgtccacgtag

SEQ ID NO: 870 - RNA, 20 nt, synthetic construct
  source 1..20: mol_type = other RNA
acttcaaggagtgggagcct

SEQ ID NO: 871 - RNA, 20 nt, synthetic construct
  source 1..20: mol_type = other RNA
acttccgtgtcccggcccgg

SEQ ID NO: 872 - RNA, 20 nt, synthetic construct
  source 1..20: mol_type = other RNA
agacacggagcgccagggac

SEQ ID NO: 873 - RNA, 20 nt, synthetic construct
  source 1..20: mol_type = other RNA
agagatgaagcggggctccc

SEQ ID NO: 874 - RNA, 20 nt, synthetic construct
  source 1..20: mol_type = other RNA
agagtattgggaccgggaga

SEQ ID NO: 875 - RNA, 20 nt, synthetic construct
  source 1..20: mol_type = other RNA
agatcggcccgaccctcctc

SEQ ID NO: 876 - RNA, 20 nt, synthetic construct
  source 1..20: mol_type = other RNA
agattcactcggaaaatctg

SEQ ID NO: 877 - RNA, 20 nt, synthetic construct
  source 1..20: mol_type = other RNA
agattttccgagtgaatctg

SEQ ID NO: 878 - RNA, 20 nt, synthetic construct
  source 1..20: mol_type = other RNA
agcaggaggggtcagagtat

SEQ ID NO: 879 - RNA, 20 nt, synthetic construct
  source 1..20: mol_type = other RNA
agcccacagagatgaagcgg

SEQ ID NO: 880 - RNA, 20 nt, synthetic construct
  source 1..20: mol_type = other RNA
agccccgcttcatctctgtg

SEQ ID NO: 881 - RNA, 20 nt, synthetic construct
  source 1..20: mol_type = other RNA
agccgcgcagcgtccgcaga

SEQ ID NO: 882 - RNA, 20 nt, synthetic construct
  source 1..20: mol_type = other RNA
agccgcgccgggaggagggt

SEQ ID NO: 883 - RNA, 20 nt, synthetic construct
  source 1..20: mol_type = other RNA
agcctgggggcgaggagggg

SEQ ID NO: 884 - RNA, 20 nt, synthetic construct
  source 1..20: mol_type = other RNA
agcgaggccggtgagtgacc

SEQ ID NO: 885 - RNA, 20 nt, synthetic construct
  source 1..20: mol_type = other RNA
agcgcacgaactgggtgtcg

SEQ ID NO: 886 - RNA, 20 nt, synthetic construct
  source 1..20: mol_type = other RNA
agcgccagggacaccgcaca

SEQ ID NO: 887 - RNA, 20 nt, synthetic construct
  source 1..20: mol_type = other RNA
agcgtccgcagattcactcg

SEQ ID NO: 888 - RNA, 20 nt, synthetic construct
  source 1..20: mol_type = other RNA
aggactcggggagccgcgcc

SEQ ID NO: 889 - RNA, 20 nt, synthetic construct
  source 1..20: mol_type = other RNA
aggaggggctgagatcggcc

SEQ ID NO: 890 - RNA, 20 nt, synthetic construct
  source 1..20: mol_type = other RNA
aggaggggtcagagtattgg

SEQ ID NO: 891 - RNA, 20 nt, synthetic construct
  source 1..20: mol_type = other RNA
aggagggtcgggccgatctc

SEQ ID NO: 892 - RNA, 20 nt, synthetic construct
  source 1..20: mol_type = other RNA
aggatggtgccgcgggcgcc

SEQ ID NO: 893 - RNA, 20 nt, synthetic construct
  source 1..20: mol_type = other RNA
aggccggtgagtgaccccgg

SEQ ID NO: 894 - RNA, 20 nt, synthetic construct
  source 1..20: mol_type = other RNA
aggctcccactccttgaagt

SEQ ID NO: 895 - RNA, 20 nt, synthetic construct
  source 1..20: mol_type = other RNA
agggacaccgcacagatttt

SEQ ID NO: 896 - RNA, 20 nt, synthetic construct
  source 1..20: mol_type = other RNA
aggggctgagatcggcccga

SEQ ID NO: 897 - RNA, 20 nt, synthetic construct
  source 1..20: mol_type = other RNA
aggggtcagagtattgggac

SEQ ID NO: 898 - RNA, 20 nt, synthetic construct
  source 1..20: mol_type = other RNA
aggggtcgtgacctgctccc

SEQ ID NO: 899 - RNA, 20 nt, synthetic construct
  source 1..20: mol_type = other RNA
agggtcgggccgatctcagc

SEQ ID NO: 900 - RNA, 20 nt, synthetic construct
  source 1..20: mol_type = other RNA
agtagccgcgcagcgtccgc

SEQ ID NO: 901 - RNA, 20 nt, synthetic construct
  source 1..20: mol_type = other RNA
agtattgggaccgggagaca

SEQ ID NO: 902 - RNA, 20 nt, synthetic construct
  source 1..20: mol_type = other RNA
agtatttccacacttccgtg

SEQ ID NO: 903 - RNA, 20 nt, synthetic construct
  source 1..20: mol_type = other RNA
agtccgaggatggtgccgcg

SEQ ID NO: 904 - RNA, 20 nt, synthetic construct
  source 1..20: mol_type = other RNA
agtgaatctgcggacgctgc

SEQ ID NO: 905 - RNA, 20 nt, synthetic construct
  source 1..20: mol_type = other RNA
agtgaccccggccaggggag

SEQ ID NO: 906 - RNA, 20 nt, synthetic construct
  source 1..20: mol_type = other RNA
agtgtggaaatacttcaagg

SEQ ID NO: 907 - RNA, 20 nt, synthetic construct
  source 1..20: mol_type = other RNA
agttcgtgcgcttcgacaac

SEQ ID NO: 908 - RNA, 20 nt, synthetic construct
  source 1..20: mol_type = other RNA
atactctgacccctcctgct

SEQ ID NO: 909 - RNA, 20 nt, synthetic construct
  source 1..20: mol_type = other RNA
atacttcaaggagtgggagc

SEQ ID NO: 910 - RNA, 20 nt, synthetic construct
  source 1..20: mol_type = other RNA
atcagagcgaggccggtgag

SEQ ID NO: 911 - RNA, 20 nt, synthetic construct
  source 1..20: mol_type = other RNA
atccacggcgcccgcggcac

SEQ ID NO: 912 - RNA, 20 nt, synthetic construct
  source 1..20: mol_type = other RNA
atcctcggactcgcggcgtc

SEQ ID NO: 913 - RNA, 20 nt, synthetic construct
  source 1..20: mol_type = other RNA
atcggcccgaccctcctccc

SEQ ID NO: 914 - RNA, 20 nt, synthetic construct
  source 1..20: mol_type = other RNA
atctcagcccctcctcgccc

SEQ ID NO: 915 - RNA, 20 nt, synthetic construct
  source 1..20: mol_type = other RNA
atctctgtgggctacgtgga

SEQ ID NO: 916 - RNA, 20 nt, synthetic construct
  source 1..20: mol_type = other RNA
atctgcggacgctgcgcggc

SEQ ID NO: 917 - RNA, 20 nt, synthetic construct
  source 1..20: mol_type = other RNA
atctgtgcggtgtccctggc

SEQ ID NO: 918 - RNA, 20 nt, synthetic construct
  source 1..20: mol_type = other RNA
atggagcaggaggggtcaga

SEQ ID NO: 919 - RNA, 20 nt, synthetic construct
  source 1..20: mol_type = other RNA
atggtgccgcgggcgccgtg

SEQ ID NO: 920 - RNA, 20 nt, synthetic construct
  source 1..20: mol_type = other RNA
attcactcggaaaatctgtg

SEQ ID NO: 921 - RNA, 20 nt, synthetic construct
  source 1..20: mol_type = other RNA
attgggaccgggagacacgg

SEQ ID NO: 922 - RNA, 20 nt, synthetic construct
  source 1..20: mol_type = other RNA
attgtagtagccgcgcagcg

SEQ ID NO: 923 - RNA, 20 nt, synthetic construct
  source 1..20: mol_type = other RNA
atttccacacttccgtgtcc

SEQ ID NO: 924 - RNA, 20 nt, synthetic construct
  source 1..20: mol_type = other RNA
attttccgagtgaatctgcg

SEQ ID NO: 925 - RNA, 20 nt, synthetic construct
  source 1..20: mol_type = other RNA
caacgacgccgcgagtccga

SEQ ID NO: 926 - RNA, 20 nt, synthetic construct
  source 1..20: mol_type = other RNA
caatactctgacccctcctg

SEQ ID NO: 927 - RNA, 20 nt, synthetic construct
  source 1..20: mol_type = other RNA
caatcagagcgaggccggtg

SEQ ID NO: 928 - RNA, 20 nt, synthetic construct
  source 1..20: mol_type = other RNA
cacacttccgtgtcccggcc

SEQ ID NO: 929 - RNA, 20 nt, synthetic construct
  source 1..20: mol_type = other RNA
cacagagatgaagcggggct

SEQ ID NO: 930 - RNA, 20 nt, synthetic construct
  source 1..20: mol_type = other RNA
cacagattttccgagtgaat

SEQ ID NO: 931 - RNA, 20 nt, synthetic construct
  source 1..20: mol_type = other RNA
caccatcctcggactcgcgg

SEQ ID NO: 932 - RNA, 20 nt, synthetic construct
  source 1..20: mol_type = other RNA
cacccagttcgtgcgcttcg

SEQ ID NO: 933 - RNA, 20 nt, synthetic construct
  source 1..20: mol_type = other RNA
caccgcacagattttccgag

SEQ ID NO: 934 - RNA, 20 nt, synthetic construct
  source 1..20: mol_type = other RNA
caccggcctcgctctgattg

SEQ ID NO: 935 - RNA, 20 nt, synthetic construct
  source 1..20: mol_type = other RNA
cacggaagtgtggaaatact

SEQ ID NO: 936 - RNA, 20 nt, synthetic construct
  source 1..20: mol_type = other RNA
cacggagcgccagggacacc

SEQ ID NO: 937 - RNA, 20 nt, synthetic construct
  source 1..20: mol_type = other RNA
cacggcgcccgcggcaccat

SEQ ID NO: 938 - RNA, 20 nt, synthetic construct
  source 1..20: mol_type = other RNA
cacgtagcccacagagatga

SEQ ID NO: 939 - RNA, 20 nt, synthetic construct
  source 1..20: mol_type = other RNA
cactcaccggcctcgctctg

SEQ ID NO: 940 - RNA, 20 nt, synthetic construct
  source 1..20: mol_type = other RNA
cactccttgaagtatttcca

SEQ ID NO: 941 - RNA, 20 nt, synthetic construct
  source 1..20: mol_type = other RNA
cactcggaaaatctgtgcgg

SEQ ID NO: 942 - RNA, 20 nt, synthetic construct
  source 1..20: mol_type = other RNA
cacttccgtgtcccggcccg

SEQ ID NO: 943 - RNA, 20 nt, synthetic construct
  source 1..20: mol_type = other RNA
cagagatgaagcggggctcc

SEQ ID NO: 944 - RNA, 20 nt, synthetic construct
  source 1..20: mol_type = other RNA
cagagtattgggaccgggag

SEQ ID NO: 945 - RNA, 20 nt, synthetic construct
  source 1..20: mol_type = other RNA
cagattcactcggaaaatct

SEQ ID NO: 946 - RNA, 20 nt, synthetic construct
  source 1..20: mol_type = other RNA
cagattttccgagtgaatct

SEQ ID NO: 947 - RNA, 20 nt, synthetic construct
  source 1..20: mol_type = other RNA
cagcgtccgcagattcactc

SEQ ID NO: 948 - RNA, 20 nt, synthetic construct
  source 1..20: mol_type = other RNA
caggaggggtcagagtattg

SEQ ID NO: 949 - RNA, 20 nt, synthetic construct
  source 1..20: mol_type = other RNA
caggctcccactccttgaag

SEQ ID NO: 950 - RNA, 20 nt, synthetic construct
  source 1..20: mol_type = other RNA
cagggacaccgcacagattt

SEQ ID NO: 951 - RNA, 20 nt, synthetic construct
  source 1..20: mol_type = other RNA
cagttcgtgcgcttcgacaa

SEQ ID NO: 952 - RNA, 20 nt, synthetic construct
  source 1..20: mol_type = other RNA
catccacggcgcccgcggca

SEQ ID NO: 953 - RNA, 20 nt, synthetic construct
  source 1..20: mol_type = other RNA
catcctcggactcgcggcgt

SEQ ID NO: 954 - RNA, 20 nt, synthetic construct
  source 1..20: mol_type = other RNA
catctctgtgggctacgtgg

SEQ ID NO: 955 - RNA, 20 nt, synthetic construct
  source 1..20: mol_type = other RNA
ccaatactctgacccctcct

SEQ ID NO: 956 - RNA, 20 nt, synthetic construct
  source 1..20: mol_type = other RNA
ccacacttccgtgtcccggc

SEQ ID NO: 957 - RNA, 20 nt, synthetic construct
  source 1..20: mol_type = other RNA
ccacagagatgaagcggggc

SEQ ID NO: 958 - RNA, 20 nt, synthetic construct
  source 1..20: mol_type = other RNA
ccacgtagcccacagagatg

SEQ ID NO: 959 - RNA, 20 nt, synthetic construct
  source 1..20: mol_type = other RNA
ccactccttgaagtatttcc

SEQ ID NO: 960 - RNA, 20 nt, synthetic construct
  source 1..20: mol_type = other RNA
ccaggctcccactccttgaa

SEQ ID NO: 961 - RNA, 20 nt, synthetic construct
  source 1..20: mol_type = other RNA
ccagggacaccgcacagatt

SEQ ID NO: 962 - RNA, 20 nt, synthetic construct
  source 1..20: mol_type = other RNA
ccagttcgtgcgcttcgaca

SEQ ID NO: 963 - RNA, 20 nt, synthetic construct
  source 1..20: mol_type = other RNA
ccatcctcggactcgcggcg

SEQ ID NO: 964 - RNA, 20 nt, synthetic construct
  source 1..20: mol_type = other RNA
cccaatactctgacccctcc

SEQ ID NO: 965 - RNA, 20 nt, synthetic construct
  source 1..20: mol_type = other RNA
cccacagagatgaagcgggg

SEQ ID NO: 966 - RNA, 20 nt, synthetic construct
  source 1..20: mol_type = other RNA
cccactccttgaagtatttc

SEQ ID NO: 967 - RNA, 20 nt, synthetic construct
  source 1..20: mol_type = other RNA
cccaggctcccactccttga

SEQ ID NO: 968 - RNA, 20 nt, synthetic construct
  source 1..20: mol_type = other RNA
cccagttcgtgcgcttcgac

SEQ ID NO: 969 - RNA, 20 nt, synthetic construct
  source 1..20: mol_type = other RNA
ccccaggctcccactccttg

SEQ ID NO: 970 - RNA, 20 nt, synthetic construct
  source 1..20: mol_type = other RNA
cccccaggctcccactcctt

SEQ ID NO: 971 - RNA, 20 nt, synthetic construct
  source 1..20: mol_type = other RNA
ccccgcttcatctctgtggg

SEQ ID NO: 972 - RNA, 20 nt, synthetic construct
  source 1..20: mol_type = other RNA
ccccggccaggggagcaggt

SEQ ID NO: 973 - RNA, 20 nt, synthetic construct
  source 1..20: mol_type = other RNA
cccctggccggggtcactca

SEQ ID NO: 974 - RNA, 20 nt, synthetic construct
  source 1..20: mol_type = other RNA
cccgcggcaccatcctcgga

SEQ ID NO: 975 - RNA, 20 nt, synthetic construct
  source 1..20: mol_type = other RNA
cccgcttcatctctgtgggc

SEQ ID NO: 976 - RNA, 20 nt, synthetic construct
  source 1..20: mol_type = other RNA
cccggccaggggagcaggtc

SEQ ID NO: 977 - RNA, 20 nt, synthetic construct
  source 1..20: mol_type = other RNA
cccggtcccaatactctgac

SEQ ID NO: 978 - RNA, 20 nt, synthetic construct
  source 1..20: mol_type = other RNA
ccctggccggggtcactcac

SEQ ID NO: 979 - RNA, 20 nt, synthetic construct
  source 1..20: mol_type = other RNA
ccctggcgctccgtgtctcc

SEQ ID NO: 980 - RNA, 20 nt, synthetic construct
  source 1..20: mol_type = other RNA
ccgaggatggtgccgcgggc

SEQ ID NO: 981 - RNA, 20 nt, synthetic construct
  source 1..20: mol_type = other RNA
ccgagtgaatctgcggacgc

SEQ ID NO: 982 - RNA, 20 nt, synthetic construct
  source 1..20: mol_type = other RNA
ccgatctcagcccctcctcg

SEQ ID NO: 983 - RNA, 20 nt, synthetic construct
  source 1..20: mol_type = other RNA
ccgcacagattttccgagtg

SEQ ID NO: 984 - RNA, 20 nt, synthetic construct
  source 1..20: mol_type = other RNA
ccgcagattcactcggaaaa

SEQ ID NO: 985 - RNA, 20 nt, synthetic construct
  source 1..20: mol_type = other RNA
ccgcgagtccgaggatggtg

SEQ ID NO: 986 - RNA, 20 nt, synthetic construct
  source 1..20: mol_type = other RNA
ccgcgcagcgtccgcagatt

SEQ ID NO: 987 - RNA, 20 nt, synthetic construct
  source 1..20: mol_type = other RNA
ccgcggcaccatcctcggac

SEQ ID NO: 988 - RNA, 20 nt, synthetic construct
  source 1..20: mol_type = other RNA
ccgcggggagccccgcttca

SEQ ID NO: 989 - RNA, 20 nt, synthetic construct
  source 1..20: mol_type = other RNA
ccgcttcatctctgtgggct

SEQ ID NO: 990 - RNA, 20 nt, synthetic construct
  source 1..20: mol_type = other RNA
ccggccaggggagcaggtca

SEQ ID NO: 991 - RNA, 20 nt, synthetic construct
  source 1..20: mol_type = other RNA
ccggcctcgctctgattgta

SEQ ID NO: 992 - RNA, 20 nt, synthetic construct
  source 1..20: mol_type = other RNA
ccgggacacggaagtgtgga

SEQ ID NO: 993 - RNA, 20 nt, synthetic construct
  source 1..20: mol_type = other RNA
ccgggagacacggagcgcca

SEQ ID NO: 994 - RNA, 20 nt, synthetic construct
  source 1..20: mol_type = other RNA
ccgggccgggacacggaagt

SEQ ID NO: 995 - RNA, 20 nt, synthetic construct
  source 1..20: mol_type = other RNA
ccggggtcactcaccggcct

SEQ ID NO: 996 - RNA, 20 nt, synthetic construct
  source 1..20: mol_type = other RNA
ccggtcccaatactctgacc

SEQ ID NO: 997 - RNA, 20 nt, synthetic construct
  source 1..20: mol_type = other RNA
ccggtgagtgaccccggcca

SEQ ID NO: 998 - RNA, 20 nt, synthetic construct
  source 1..20: mol_type = other RNA
ccgtggatggagcaggaggg

SEQ ID NO: 999 - RNA, 20 nt, synthetic construct
  source 1..20: mol_type = other RNA
ccgtgtctcccggtcccaat

SEQ ID NO: 1000 - RNA, 20 nt, synthetic construct
  source 1..20: mol_type = other RNA
cctcgcccccaggctcccac

SEQ ID NO: 1001 - RNA, 20 nt, synthetic construct
  source 1..20: mol_type = other RNA
cctcgctctgattgtagtag

SEQ ID NO: 1002 - RNA, 20 nt, synthetic construct
  source 1..20: mol_type = other RNA
cctcggactcgcggcgtcgt

SEQ ID NO: 1003 - RNA, 20 nt, synthetic construct
  source 1..20: mol_type = other RNA
cctgctccatccacggcgcc

SEQ ID NO: 1004 - RNA, 20 nt, synthetic construct
  source 1..20: mol_type = other RNA
cctgctcccctggccggggt

SEQ ID NO: 1005 - RNA, 20 nt, synthetic construct
  source 1..20: mol_type = other RNA
cctggccggggtcactcacc

SEQ ID NO: 1006 - RNA, 20 nt, synthetic construct
  source 1..20: mol_type = other RNA
cctggcgctccgtgtctccc

SEQ ID NO: 1007 - RNA, 20 nt, synthetic construct
  source 1..20: mol_type = other RNA
cctgggggcgaggaggggct

SEQ ID NO: 1008 - RNA, 20 nt, synthetic construct
  source 1..20: mol_type = other RNA
ccttgaagtatttccacact

SEQ ID NO: 1009 - RNA, 20 nt, synthetic construct
  source 1..20: mol_type = other RNA
cgaagcgcacgaactgggtg

SEQ ID NO: 1010 - RNA, 20 nt, synthetic construct
  source 1..20: mol_type = other RNA
cgaaggactcggggagccgc

SEQ ID NO: 1011 - RNA, 20 nt, synthetic construct
  source 1..20: mol_type = other RNA
cgacaacgacgccgcgagtc

SEQ ID NO: 1012 - RNA, 20 nt, synthetic construct
  source 1..20: mol_type = other RNA
cgacacccagttcgtgcgct

SEQ ID NO: 1013 - RNA, 20 nt, synthetic construct
  source 1..20: mol_type = other RNA
cgacgccgcgagtccgagga

SEQ ID NO: 1014 - RNA, 20 nt, synthetic construct
  source 1..20: mol_type = other RNA
cgaggaggggctgagatcgg

SEQ ID NO: 1015 - RNA, 20 nt, synthetic construct
  source 1..20: mol_type = other RNA
cgaggatggtgccgcgggcg

SEQ ID NO: 1016 - RNA, 20 nt, synthetic construct
  source 1..20: mol_type = other RNA
cgaggccggtgagtgacccc

SEQ ID NO: 1017 - RNA, 20 nt, synthetic construct
  source 1..20: mol_type = other RNA
cgagtccgaggatggtgccg

SEQ ID NO: 1018 - RNA, 20 nt, synthetic construct
  source 1..20: mol_type = other RNA
cgagtgaatctgcggacgct

SEQ ID NO: 1019 - RNA, 20 nt, synthetic construct
  source 1..20: mol_type = other RNA
cgatctcagcccctcctcgc

SEQ ID NO: 1020 - RNA, 20 nt, synthetic construct
  source 1..20: mol_type = other RNA
cgcacagattttccgagtga

SEQ ID NO: 1021 - RNA, 20 nt, synthetic construct
  source 1..20: mol_type = other RNA
cgcacgaactgggtgtcgtc

SEQ ID NO: 1022 - RNA, 20 nt, synthetic construct
  source 1..20: mol_type = other RNA
cgcagattcactcggaaaat

SEQ ID NO: 1023 - RNA, 20 nt, synthetic construct
  source 1..20: mol_type = other RNA
cgcagcgtccgcagattcac

SEQ ID NO: 1024 - RNA, 20 nt, synthetic construct
  source 1..20: mol_type = other RNA
cgccagggacaccgcacaga

SEQ ID NO: 1025 - RNA, 20 nt, synthetic construct
  source 1..20: mol_type = other RNA
cgcccccaggctcccactcc

SEQ ID NO: 1026 - RNA, 20 nt, synthetic construct
  source 1..20: mol_type = other RNA
cgcccgcggcaccatcctcg

SEQ ID NO: 1027 - RNA, 20 nt, synthetic construct
  source 1..20: mol_type = other RNA
cgccgcgagtccgaggatgg

SEQ ID NO: 1028 - RNA, 20 nt, synthetic construct
  source 1..20: mol_type = other RNA
cgccgtggatggagcaggag

SEQ ID NO: 1029 - RNA, 20 nt, synthetic construct
  source 1..20: mol_type = other RNA
cgcgagtccgaggatggtgc

SEQ ID NO: 1030 - RNA, 20 nt, synthetic construct
  source 1..20: mol_type = other RNA
cgcgcagcgtccgcagattc

SEQ ID NO: 1031 - RNA, 20 nt, synthetic construct
  source 1..20: mol_type = other RNA
cgcggcaccatcctcggact

SEQ ID NO: 1032 - RNA, 20 nt, synthetic construct
  source 1..20: mol_type = other RNA
cgcggcgtcgttgtcgaagc

SEQ ID NO: 1033 - RNA, 20 nt, synthetic construct
  source 1..20: mol_type = other RNA
cgcggctactacaatcagag

SEQ ID NO: 1034 - RNA, 20 nt, synthetic construct
  source 1..20: mol_type = other RNA
cgcggggagccccgcttcat

SEQ ID NO: 1035 - RNA, 20 nt, synthetic construct
  source 1..20: mol_type = other RNA
cgctccgtgtctcccggtcc

SEQ ID NO: 1036 - RNA, 20 nt, synthetic construct
  source 1..20: mol_type = other RNA
cgctctgattgtagtagccg

SEQ ID NO: 1037 - RNA, 20 nt, synthetic construct
  source 1..20: mol_type = other RNA
cgctgcgcggctactacaat

SEQ ID NO: 1038 - RNA, 20 nt, synthetic construct
  source 1..20: mol_type = other RNA
cgcttcatctctgtgggcta

SEQ ID NO: 1039 - RNA, 20 nt, synthetic construct
  source 1..20: mol_type = other RNA
cgcttcgacaacgacgccgc

SEQ ID NO: 1040 - RNA, 20 nt, synthetic construct
  source 1..20: mol_type = other RNA
cggaaaatctgtgcggtgtc

SEQ ID NO: 1041 - RNA, 20 nt, synthetic construct
  source 1..20: mol_type = other RNA
cggaagtgtggaaatacttc

SEQ ID NO: 1042 - RNA, 20 nt, synthetic construct
  source 1..20: mol_type = other RNA
cggacgctgcgcggctacta

SEQ ID NO: 1043 - RNA, 20 nt, synthetic construct
  source 1..20: mol_type = other RNA
cggactcgcggcgtcgttgt

SEQ ID NO: 1044 - RNA, 20 nt, synthetic construct
  source 1..20: mol_type = other RNA
cggagcgccagggacaccgc

SEQ ID NO: 1045 - RNA, 20 nt, synthetic construct
  source 1..20: mol_type = other RNA
cggcaccatcctcggactcg

SEQ ID NO: 1046 - RNA, 20 nt, synthetic construct
  source 1..20: mol_type = other RNA
cggcctcgctctgattgtag

SEQ ID NO: 1047 - RNA, 20 nt, synthetic construct
  source 1..20: mol_type = other RNA
cggcgtcgttgtcgaagcgc

SEQ ID NO: 1048 - RNA, 20 nt, synthetic construct
  source 1..20: mol_type = other RNA
cggctactacaatcagagcg

SEQ ID NO: 1049 - RNA, 20 nt, synthetic construct
  source 1..20: mol_type = other RNA
cgggacacggaagtgtggaa

SEQ ID NO: 1050 - RNA, 20 nt, synthetic construct
  source 1..20: mol_type = other RNA
cgggagacacggagcgccag

SEQ ID NO: 1051 - RNA, 20 nt, synthetic construct
  source 1..20: mol_type = other RNA
cgggaggagggtcgggccga

SEQ ID NO: 1052 - RNA, 20 nt, synthetic construct
  source 1..20: mol_type = other RNA
cgggccgatctcagcccctc

SEQ ID NO: 1053 - RNA, 20 nt, synthetic construct
  source 1..20: mol_type = other RNA
cgggccgggacacggaagtg

SEQ ID NO: 1054 - RNA, 20 nt, synthetic construct
  source 1..20: mol_type = other RNA
cgggcgccgtggatggagca

SEQ ID NO: 1055 - RNA, 20 nt, synthetic construct
  source 1..20: mol_type = other RNA
cggggagccccgcttcatct

SEQ ID NO: 1056 - RNA, 20 nt, synthetic construct
  source 1..20: mol_type = other RNA
cggggtcactcaccggcctc

SEQ ID NO: 1057 - RNA, 20 nt, synthetic construct
  source 1..20: mol_type = other RNA
cggtcccaatactctgaccc

SEQ ID NO: 1058 - RNA, 20 nt, synthetic construct
  source 1..20: mol_type = other RNA
cggtgagtgaccccggccag

SEQ ID NO: 1059 - RNA, 20 nt, synthetic construct
  source 1..20: mol_type = other RNA
cggtgtccctggcgctccgt

SEQ ID NO: 1060 - RNA, 20 nt, synthetic construct
  source 1..20: mol_type = other RNA
cgtagcccacagagatgaag

SEQ ID NO: 1061 - RNA, 20 nt, synthetic construct
  source 1..20: mol_type = other RNA
cgtccacgtagcccacagag

SEQ ID NO: 1062 - RNA, 20 nt, synthetic construct
  source 1..20: mol_type = other RNA
cgtccgcagattcactcgga

SEQ ID NO: 1063 - RNA, 20 nt, synthetic construct
  source 1..20: mol_type = other RNA
cgtcgttgtcgaagcgcacg

SEQ ID NO: 1064 - RNA, 20 nt, synthetic construct
  source 1..20: mol_type = other RNA
cgtgacctgctcccctggcc

SEQ ID NO: 1065 - RNA, 20 nt, synthetic construct
  source 1..20: mol_type = other RNA
cgtgcgcttcgacaacgacg

SEQ ID NO: 1066 - RNA, 20 nt, synthetic construct
  source 1..20: mol_type = other RNA
cgtggacgacacccagttcg

SEQ ID NO: 1067 - RNA, 20 nt, synthetic construct
  source 1..20: mol_type = other RNA
cgtggatggagcaggagggg

SEQ ID NO: 1068 - RNA, 20 nt, synthetic construct
  source 1..20: mol_type = other RNA
cgtgtctcccggtcccaata

SEQ ID NO: 1069 - RNA, 20 nt, synthetic construct
  source 1..20: mol_type = other RNA
cgttgtcgaagcgcacgaac

SEQ ID NO: 1070 - RNA, 20 nt, synthetic construct
  source 1..20: mol_type = other RNA
ctacaatcagagcgaggccg

SEQ ID NO: 1071 - RNA, 20 nt, synthetic construct
  source 1..20: mol_type = other RNA
ctacgtggacgacacccagt

SEQ ID NO: 1072 - RNA, 20 nt, synthetic construct
  source 1..20: mol_type = other RNA
ctactacaatcagagcgagg

SEQ ID NO: 1073 - RNA, 20 nt, synthetic construct
  source 1..20: mol_type = other RNA
ctcaccggcctcgctctgat

SEQ ID NO: 1074 - RNA, 20 nt, synthetic construct
  source 1..20: mol_type = other RNA
ctccatccacggcgcccgcg

SEQ ID NO: 1075 - RNA, 20 nt, synthetic construct
  source 1..20: mol_type = other RNA
ctcccactccttgaagtatt

SEQ ID NO: 1076 - RNA, 20 nt, synthetic construct
  source 1..20: mol_type = other RNA
ctcccctggccggggtcact

SEQ ID NO: 1077 - RNA, 20 nt, synthetic construct
  source 1..20: mol_type = other RNA
ctcccggtcccaatactctg

SEQ ID NO: 1078 - RNA, 20 nt, synthetic construct
  source 1..20: mol_type = other RNA
ctccgtgtctcccggtccca

SEQ ID NO: 1079 - RNA, 20 nt, synthetic construct
  source 1..20: mol_type = other RNA
ctccttgaagtatttccaca

SEQ ID NO: 1080 - RNA, 20 nt, synthetic construct
  source 1..20: mol_type = other RNA
ctcgcccccaggctcccact

SEQ ID NO: 1081 - RNA, 20 nt, synthetic construct
  source 1..20: mol_type = other RNA
ctcgcggcgtcgttgtcgaa

SEQ ID NO: 1082 - RNA, 20 nt, synthetic construct
  source 1..20: mol_type = other RNA
ctcgctctgattgtagtagc

SEQ ID NO: 1083 - RNA, 20 nt, synthetic construct
  source 1..20: mol_type = other RNA
ctcggaaaatctgtgcggtg

SEQ ID NO: 1084 - RNA, 20 nt, synthetic construct
  source 1..20: mol_type = other RNA
ctcggactcgcggcgtcgtt

SEQ ID NO: 1085 - RNA, 20 nt, synthetic construct
  source 1..20: mol_type = other RNA
ctctgacccctcctgctcca

SEQ ID NO: 1086 - RNA, 20 nt, synthetic construct
  source 1..20: mol_type = other RNA
ctctgattgtagtagccgcg

SEQ ID NO: 1087 - RNA, 20 nt, synthetic construct
  source 1..20: mol_type = other RNA
ctctgtgggctacgtggacg

SEQ ID NO: 1088 - RNA, 20 nt, synthetic construct
  source 1..20: mol_type = other RNA
ctgacccctcctgctccatc

SEQ ID NO: 1089 - RNA, 20 nt, synthetic construct
  source 1..20: mol_type = other RNA
ctgagatcggcccgaccctc

SEQ ID NO: 1090 - RNA, 20 nt, synthetic construct
  source 1..20: mol_type = other RNA
ctgattgtagtagccgcgca

SEQ ID NO: 1091 - RNA, 20 nt, synthetic construct
  source 1..20: mol_type = other RNA
ctgcgcggctactacaatca

SEQ ID NO: 1092 - RNA, 20 nt, synthetic construct
  source 1..20: mol_type = other RNA
ctgcggacgctgcgcggcta

SEQ ID NO: 1093 - RNA, 20 nt, synthetic construct
  source 1..20: mol_type = other RNA
ctgctccatccacggcgccc

SEQ ID NO: 1094 - RNA, 20 nt, synthetic construct
  source 1..20: mol_type = other RNA
ctgctcccctggccggggtc

SEQ ID NO: 1095 - RNA, 20 nt, synthetic construct
  source 1..20: mol_type = other RNA
ctggccggggtcactcaccg

SEQ ID NO: 1096 - RNA, 20 nt, synthetic construct
  source 1..20: mol_type = other RNA
ctggcgctccgtgtctcccg

SEQ ID NO: 1097 - RNA, 20 nt, synthetic construct
  source 1..20: mol_type = other RNA
ctgggggcgaggaggggctg

SEQ ID NO: 1098 - RNA, 20 nt, synthetic construct
  source 1..20: mol_type = other RNA
ctgggtgtcgtccacgtagc

SEQ ID NO: 1099 - RNA, 20 nt, synthetic construct
  source 1..20: mol_type = other RNA
ctgtgcggtgtccctggcgc

SEQ ID NO: 1100 - RNA, 20 nt, synthetic construct
  source 1..20: mol_type = other RNA
ctgtgggctacgtggacgac

SEQ ID NO: 1101 - RNA, 20 nt, synthetic construct
  source 1..20: mol_type = other RNA
cttcaaggagtgggagcctg

SEQ ID NO: 1102 - RNA, 20 nt, synthetic construct
  source 1..20: mol_type = other RNA
cttcatctctgtgggctacg

SEQ ID NO: 1103 - RNA, 20 nt, synthetic construct
  source 1..20: mol_type = other RNA
cttccgtgtcccggcccggc

SEQ ID NO: 1104 - RNA, 20 nt, synthetic construct
  source 1..20: mol_type = other RNA
cttcgacaacgacgccgcga

SEQ ID NO: 1105 - RNA, 20 nt, synthetic construct
  source 1..20: mol_type = other RNA
cttgaagtatttccacactt

SEQ ID NO: 1106 - RNA, 20 nt, synthetic construct
  source 1..20: mol_type = other RNA
gaaaatctgtgcggtgtccc

SEQ ID NO: 1107 - RNA, 20 nt, synthetic construct
  source 1..20: mol_type = other RNA
gaaatacttcaaggagtggg

SEQ ID NO: 1108 - RNA, 20 nt, synthetic construct
  source 1..20: mol_type = other RNA
gaactgggtgtcgtccacgt

SEQ ID NO: 1109 - RNA, 20 nt, synthetic construct
  source 1..20: mol_type = other RNA
gaagcgcacgaactgggtgt

SEQ ID NO: 1110 - RNA, 20 nt, synthetic construct
  source 1..20: mol_type = other RNA
gaaggactcggggagccgcg

SEQ ID NO: 1111 - RNA, 20 nt, synthetic construct
  source 1..20: mol_type = other RNA
gaagtatttccacacttccg

SEQ ID NO: 1112 - RNA, 20 nt, synthetic construct
  source 1..20: mol_type = other RNA
gaagtgtggaaatacttcaa

SEQ ID NO: 1113 - RNA, 20 nt, synthetic construct
  source 1..20: mol_type = other RNA
gaatctgcggacgctgcgcg

SEQ ID NO: 1114 - RNA, 20 nt, synthetic construct
  source 1..20: mol_type = other RNA
gacaacgacgccgcgagtcc

SEQ ID NO: 1115 - RNA, 20 nt, synthetic construct
  source 1..20: mol_type = other RNA
gacacccagttcgtgcgctt

SEQ ID NO: 1116 - RNA, 20 nt, synthetic construct
  source 1..20: mol_type = other RNA
gacaccgcacagattttccg

SEQ ID NO: 1117 - RNA, 20 nt, synthetic construct
  source 1..20: mol_type = other RNA
gacacggaagtgtggaaata

SEQ ID NO: 1118 - RNA, 20 nt, synthetic construct
  source 1..20: mol_type = other RNA
gacacggagcgccagggaca

SEQ ID NO: 1119 - RNA, 20 nt, synthetic construct
  source 1..20: mol_type = other RNA
gaccccggccaggggagcag

SEQ ID NO: 1120 - RNA, 20 nt, synthetic construct
  source 1..20: mol_type = other RNA
gacccctcctgctccatcca

SEQ ID NO: 1121 - RNA, 20 nt, synthetic construct
  source 1..20: mol_type = other RNA
gaccgggagacacggagcgc

SEQ ID NO: 1122 - RNA, 20 nt, synthetic construct
  source 1..20: mol_type = other RNA
gacctgctcccctggccggg

SEQ ID NO: 1123 - RNA, 20 nt, synthetic construct
  source 1..20: mol_type = other RNA
gacgacacccagttcgtgcg

SEQ ID NO: 1124 - RNA, 20 nt, synthetic construct
  source 1..20: mol_type = other RNA
gacgccgcgagtccgaggat

SEQ ID NO: 1125 - RNA, 20 nt, synthetic construct
  source 1..20: mol_type = other RNA
gacgctgcgcggctactaca

SEQ ID NO: 1126 - RNA, 20 nt, synthetic construct
  source 1..20: mol_type = other RNA
gactcgcggcgtcgttgtcg

SEQ ID NO: 1127 - RNA, 20 nt, synthetic construct
  source 1..20: mol_type = other RNA
gagacacggagcgccaggga

SEQ ID NO: 1128 - RNA, 20 nt, synthetic construct
  source 1..20: mol_type = other RNA
gagatcggcccgaccctcct

SEQ ID NO: 1129 - RNA, 20 nt, synthetic construct
  source 1..20: mol_type = other RNA
gagcaggaggggtcagagta

SEQ ID NO: 1130 - RNA, 20 nt, synthetic construct
  source 1..20: mol_type = other RNA
gagccccgcttcatctctgt

SEQ ID NO: 1131 - RNA, 20 nt, synthetic construct
  source 1..20: mol_type = other RNA
gagcctgggggcgaggaggg

SEQ ID NO: 1132 - RNA, 20 nt, synthetic construct
  source 1..20: mol_type = other RNA
gagcgaggccggtgagtgac

SEQ ID NO: 1133 - RNA, 20 nt, synthetic construct
  source 1..20: mol_type = other RNA
gagcgccagggacaccgcac

SEQ ID NO: 1134 - RNA, 20 nt, synthetic construct
  source 1..20: mol_type = other RNA
gaggaggggctgagatcggc

SEQ ID NO: 1135 - RNA, 20 nt, synthetic construct
  source 1..20: mol_type = other RNA
gaggagggtcgggccgatct

SEQ ID NO: 1136 - RNA, 20 nt, synthetic construct
  source 1..20: mol_type = other RNA
gaggatggtgccgcgggcgc

SEQ ID NO: 1137 - RNA, 20 nt, synthetic construct
  source 1..20: mol_type = other RNA
gaggccggtgagtgaccccg

SEQ ID NO: 1138 - RNA, 20 nt, synthetic construct
  source 1..20: mol_type = other RNA
gaggggctgagatcggcccg

SEQ ID NO: 1139 - RNA, 20 nt, synthetic construct
  source 1..20: mol_type = other RNA
gaggggtcagagtattggga

SEQ ID NO: 1140 - RNA, 20 nt, synthetic construct
  source 1..20: mol_type = other RNA
gagggtcgggccgatctcag

SEQ ID NO: 1141 - RNA, 20 nt, synthetic construct
  source 1..20: mol_type = other RNA
gagtattgggaccgggagac

SEQ ID NO: 1142 - RNA, 20 nt, synthetic construct
  source 1..20: mol_type = other RNA
gagtccgaggatggtgccgc

SEQ ID NO: 1143 - RNA, 20 nt, synthetic construct
  source 1..20: mol_type = other RNA
gagtgaatctgcggacgctg

SEQ ID NO: 1144 - RNA, 20 nt, synthetic construct
  source 1..20: mol_type = other RNA
gagtgaccccggccagggga

SEQ ID NO: 1145 - RNA, 20 nt, synthetic construct
  source 1..20: mol_type = other RNA
gatcggcccgaccctcctcc

SEQ ID NO: 1146 - RNA, 20 nt, synthetic construct
  source 1..20: mol_type = other RNA
gatctcagcccctcctcgcc

SEQ ID NO: 1147 - RNA, 20 nt, synthetic construct
  source 1..20: mol_type = other RNA
gatggagcaggaggggtcag

SEQ ID NO: 1148 - RNA, 20 nt, synthetic construct
  source 1..20: mol_type = other RNA
gatggtgccgcgggcgccgt

SEQ ID NO: 1149 - RNA, 20 nt, synthetic construct
  source 1..20: mol_type = other RNA
gattcactcggaaaatctgt

SEQ ID NO: 1150 - RNA, 20 nt, synthetic construct
  source 1..20: mol_type = other RNA
gattgtagtagccgcgcagc

SEQ ID NO: 1151 - RNA, 20 nt, synthetic construct
  source 1..20: mol_type = other RNA
gattttccgagtgaatctgc

SEQ ID NO: 1152 - RNA, 20 nt, synthetic construct
  source 1..20: mol_type = other RNA
gcacagattttccgagtgaa

SEQ ID NO: 1153 - RNA, 20 nt, synthetic construct
  source 1..20: mol_type = other RNA
gcaccatcctcggactcgcg

SEQ ID NO: 1154 - RNA, 20 nt, synthetic construct
  source 1..20: mol_type = other RNA
gcacgaactgggtgtcgtcc

SEQ ID NO: 1155 - RNA, 20 nt, synthetic construct
  source 1..20: mol_type = other RNA
gcagattcactcggaaaatc

SEQ ID NO: 1156 - RNA, 20 nt, synthetic construct
  source 1..20: mol_type = other RNA
gcagcgtccgcagattcact

SEQ ID NO: 1157 - RNA, 20 nt, synthetic construct
  source 1..20: mol_type = other RNA
gcaggaggggtcagagtatt

SEQ ID NO: 1158 - RNA, 20 nt, synthetic construct
  source 1..20: mol_type = other RNA
gccagggacaccgcacagat

SEQ ID NO: 1159 - RNA, 20 nt, synthetic construct
  source 1..20: mol_type = other RNA
gcccacagagatgaagcggg

SEQ ID NO: 1160 - RNA, 20 nt, synthetic construct
  source 1..20: mol_type = other RNA
gcccccaggctcccactcct

SEQ ID NO: 1161 - RNA, 20 nt, synthetic construct
  source 1..20: mol_type = other RNA
gccccgcttcatctctgtgg

SEQ ID NO: 1162 - RNA, 20 nt, synthetic construct
  source 1..20: mol_type = other RNA
gcccgcggcaccatcctcgg

SEQ ID NO: 1163 - RNA, 20 nt, synthetic construct
  source 1..20: mol_type = other RNA
gccgatctcagcccctcctc

SEQ ID NO: 1164 - RNA, 20 nt, synthetic construct
  source 1..20: mol_type = other RNA
gccgcgagtccgaggatggt

SEQ ID NO: 1165 - RNA, 20 nt, synthetic construct
  source 1..20: mol_type = other RNA
gccgcgcagcgtccgcagat

SEQ ID NO: 1166 - RNA, 20 nt, synthetic construct
  source 1..20: mol_type = other RNA
gccgggacacggaagtgtgg

SEQ ID NO: 1167 - RNA, 20 nt, synthetic construct
  source 1..20: mol_type = other RNA
gccgggccgggacacggaag

SEQ ID NO: 1168 - RNA, 20 nt, synthetic construct
  source 1..20: mol_type = other RNA
gccggtgagtgaccccggcc

SEQ ID NO: 1169 - RNA, 20 nt, synthetic construct
  source 1..20: mol_type = other RNA
gccgtggatggagcaggagg

SEQ ID NO: 1170 - RNA, 20 nt, synthetic construct
  source 1..20: mol_type = other RNA
gcctcgctctgattgtagta

SEQ ID NO: 1171 - RNA, 20 nt, synthetic construct
  source 1..20: mol_type = other RNA
gcgaaggactcggggagccg

SEQ ID NO: 1172 - RNA, 20 nt, synthetic construct
  source 1..20: mol_type = other RNA
gcgaggaggggctgagatcg

SEQ ID NO: 1173 - RNA, 20 nt, synthetic construct
  source 1..20: mol_type = other RNA
gcgaggccggtgagtgaccc

SEQ ID NO: 1174 - RNA, 20 nt, synthetic construct
  source 1..20: mol_type = other RNA
gcgagtccgaggatggtgcc

SEQ ID NO: 1175 - RNA, 20 nt, synthetic construct
  source 1..20: mol_type = other RNA
gcgcacgaactgggtgtcgt

SEQ ID NO: 1176 - RNA, 20 nt, synthetic construct
  source 1..20: mol_type = other RNA
gcgcagcgtccgcagattca

SEQ ID NO: 1177 - RNA, 20 nt, synthetic construct
  source 1..20: mol_type = other RNA
gcgccagggacaccgcacag

SEQ ID NO: 1178 - RNA, 20 nt, synthetic construct
  source 1..20: mol_type = other RNA
gcgcccgcggcaccatcctc

SEQ ID NO: 1179 - RNA, 20 nt, synthetic construct
  source 1..20: mol_type = other RNA
gcgccgtggatggagcagga

SEQ ID NO: 1180 - RNA, 20 nt, synthetic construct
  source 1..20: mol_type = other RNA
gcgcggctactacaatcaga

SEQ ID NO: 1181 - RNA, 20 nt, synthetic construct
  source 1..20: mol_type = other RNA
gcgctccgtgtctcccggtc

SEQ ID NO: 1182 - RNA, 20 nt, synthetic construct
  source 1..20: mol_type = other RNA
gcgcttcgacaacgacgccg

SEQ ID NO: 1183 - RNA, 20 nt, synthetic construct
  source 1..20: mol_type = other RNA
gcggacgctgcgcggctact

SEQ ID NO: 1184 - RNA, 20 nt, synthetic construct
  source 1..20: mol_type = other RNA
gcggcaccatcctcggactc

SEQ ID NO: 1185 - RNA, 20 nt, synthetic construct
  source 1..20: mol_type = other RNA
gcggcgtcgttgtcgaagcg

SEQ ID NO: 1186 - RNA, 20 nt, synthetic construct
  source 1..20: mol_type = other RNA
gcggctactacaatcagagc

SEQ ID NO: 1187 - RNA, 20 nt, synthetic construct
  source 1..20: mol_type = other RNA
gcggggagccccgcttcatc

SEQ ID NO: 1188 - RNA, 20 nt, synthetic construct
  source 1..20: mol_type = other RNA
gcggtgtccctggcgctccg

SEQ ID NO: 1189 - RNA, 20 nt, synthetic construct
  source 1..20: mol_type = other RNA
gcgtccgcagattcactcgg

SEQ ID NO: 1190 - RNA, 20 nt, synthetic construct
  source 1..20: mol_type = other RNA
gcgtcgttgtcgaagcgcac

SEQ ID NO: 1191 - RNA, 20 nt, synthetic construct
  source 1..20: mol_type = other RNA
gctacgtggacgacacccag

SEQ ID NO: 1192 - RNA, 20 nt, synthetic construct
  source 1..20: mol_type = other RNA
gctactacaatcagagcgag

SEQ ID NO: 1193 - RNA, 20 nt, synthetic construct
  source 1..20: mol_type = other RNA
gctccatccacggcgcccgc

SEQ ID NO: 1194 - RNA, 20 nt, synthetic construct
  source 1..20: mol_type = other RNA
gctcccactccttgaagtat

SEQ ID NO: 1195 - RNA, 20 nt, synthetic construct
  source 1..20: mol_type = other RNA
gctcccctggccggggtcac

SEQ ID NO: 1196 - RNA, 20 nt, synthetic construct
  source 1..20: mol_type = other RNA
gctccgtgtctcccggtccc

SEQ ID NO: 1197 - RNA, 20 nt, synthetic construct
  source 1..20: mol_type = other RNA
gctctgattgtagtagccgc

SEQ ID NO: 1198 - RNA, 20 nt, synthetic construct
  source 1..20: mol_type = other RNA
gctgagatcggcccgaccct

SEQ ID NO: 1199 - RNA, 20 nt, synthetic construct
  source 1..20: mol_type = other RNA
gctgcgcggctactacaatc

SEQ ID NO: 1200 - RNA, 20 nt, synthetic construct
  source 1..20: mol_type = other RNA
gcttcatctctgtgggctac

SEQ ID NO: 1201 - RNA, 20 nt, synthetic construct
  source 1..20: mol_type = other RNA
gcttcgacaacgacgccgcg

SEQ ID NO: 1202 - RNA, 20 nt, synthetic construct
  source 1..20: mol_type = other RNA
ggaaaatctgtgcggtgtcc

SEQ ID NO: 1203 - RNA, 20 nt, synthetic construct
  source 1..20: mol_type = other RNA
ggaaatacttcaaggagtgg

SEQ ID NO: 1204 - RNA, 20 nt, synthetic construct
  source 1..20: mol_type = other RNA
ggaagtgtggaaatacttca

SEQ ID NO: 1205 - RNA, 20 nt, synthetic construct
  source 1..20: mol_type = other RNA
ggacaccgcacagattttcc

SEQ ID NO: 1206 - RNA, 20 nt, synthetic construct
  source 1..20: mol_type = other RNA
ggacacggaagtgtggaaat

SEQ ID NO: 1207 - RNA, 20 nt, synthetic construct
  source 1..20: mol_type = other RNA
ggaccgggagacacggagcg

SEQ ID NO: 1208 - RNA, 20 nt, synthetic construct
  source 1..20: mol_type = other RNA
ggacgacacccagttcgtgc

SEQ ID NO: 1209 - RNA, 20 nt, synthetic construct
  source 1..20: mol_type = other RNA
ggacgctgcgcggctactac

SEQ ID NO: 1210 - RNA, 20 nt, synthetic construct
  source 1..20: mol_type = other RNA
ggactcgcggcgtcgttgtc

SEQ ID NO: 1211 - RNA, 20 nt, synthetic construct
  source 1..20: mol_type = other RNA
ggagacacggagcgccaggg

SEQ ID NO: 1212 - RNA, 20 nt, synthetic construct
  source 1..20: mol_type = other RNA
ggagcaggaggggtcagagt

SEQ ID NO: 1213 - RNA, 20 nt, synthetic construct
  source 1..20: mol_type = other RNA
ggagccccgcttcatctctg

SEQ ID NO: 1214 - RNA, 20 nt, synthetic construct
  source 1..20: mol_type = other RNA
ggagcgccagggacaccgca

SEQ ID NO: 1215 - RNA, 20 nt, synthetic construct
  source 1..20: mol_type = other RNA
ggaggagggtcgggccgatc

SEQ ID NO: 1216 - RNA, 20 nt, synthetic construct
  source 1..20: mol_type = other RNA
ggaggggctgagatcggccc

SEQ ID NO: 1217 - RNA, 20 nt, synthetic construct
  source 1..20: mol_type = other RNA
ggaggggtcagagtattggg

SEQ ID NO: 1218 - RNA, 20 nt, synthetic construct
  source 1..20: mol_type = other RNA
ggagggtcgggccgatctca

SEQ ID NO: 1219 - RNA, 20 nt, synthetic construct
  source 1..20: mol_type = other RNA
ggatggagcaggaggggtca

SEQ ID NO: 1220 - RNA, 20 nt, synthetic construct
  source 1..20: mol_type = other RNA
ggcaccatcctcggactcgc

SEQ ID NO: 1221 - RNA, 20 nt, synthetic construct
  source 1..20: mol_type = other RNA
ggccgatctcagcccctcct

SEQ ID NO: 1222 - RNA, 20 nt, synthetic construct
  source 1..20: mol_type = other RNA
ggccgggacacggaagtgtg

SEQ ID NO: 1223 - RNA, 20 nt, synthetic construct
  source 1..20: mol_type = other RNA
ggccgggccgggacacggaa

SEQ ID NO: 1224 - RNA, 20 nt, synthetic construct
  source 1..20: mol_type = other RNA
ggccggtgagtgaccccggc

SEQ ID NO: 1225 - RNA, 20 nt, synthetic construct
  source 1..20: mol_type = other RNA
ggcctcgctctgattgtagt

SEQ ID NO: 1226 - RNA, 20 nt, synthetic construct
  source 1..20: mol_type = other RNA
ggcgaaggactcggggagcc

SEQ ID NO: 1227 - RNA, 20 nt, synthetic construct
  source 1..20: mol_type = other RNA
ggcgaggaggggctgagatc

SEQ ID NO: 1228 - RNA, 20 nt, synthetic construct
  source 1..20: mol_type = other RNA
ggcgcccgcggcaccatcct

SEQ ID NO: 1229 - RNA, 20 nt, synthetic construct
  source 1..20: mol_type = other RNA
ggcgccgtggatggagcagg

SEQ ID NO: 1230 - RNA, 20 nt, synthetic construct
  source 1..20: mol_type = other RNA
ggcgcggctccccgagtcct

SEQ ID NO: 1231 - RNA, 20 nt, synthetic construct
  source 1..20: mol_type = other RNA
ggcgctccgtgtctcccggt

SEQ ID NO: 1232 - RNA, 20 nt, synthetic construct
  source 1..20: mol_type = other RNA
ggcgtcgttgtcgaagcgca

SEQ ID NO: 1233 - RNA, 20 nt, synthetic construct
  source 1..20: mol_type = other RNA
ggctacgtggacgacaccca

SEQ ID NO: 1234 - RNA, 20 nt, synthetic construct
  source 1..20: mol_type = other RNA
ggctactacaatcagagcga

SEQ ID NO: 1235 - RNA, 20 nt, synthetic construct
  source 1..20: mol_type = other RNA
ggctcccactccttgaagta

SEQ ID NO: 1236 - RNA, 20 nt, synthetic construct
  source 1..20: mol_type = other RNA
ggctgagatcggcccgaccc

SEQ ID NO: 1237 - RNA, 20 nt, synthetic construct
  source 1..20: mol_type = other RNA
gggacaccgcacagattttc

SEQ ID NO: 1238 - RNA, 20 nt, synthetic construct
  source 1..20: mol_type = other RNA
gggacacggaagtgtggaaa

SEQ ID NO: 1239 - RNA, 20 nt, synthetic construct
  source 1..20: mol_type = other RNA
gggaccgggagacacggagc

SEQ ID NO: 1240 - RNA, 20 nt, synthetic construct
  source 1..20: mol_type = other RNA
gggagacacggagcgccagg

SEQ ID NO: 1241 - RNA, 20 nt, synthetic construct
  source 1..20: mol_type = other RNA
gggagccccgcttcatctct

SEQ ID NO: 1242 - RNA, 20 nt, synthetic construct
  source 1..20: mol_type = other RNA
gggaggagggtcgggccgat

SEQ ID NO: 1243 - RNA, 20 nt, synthetic construct
  source 1..20: mol_type = other RNA
gggccgatctcagcccctcc

SEQ ID NO: 1244 - RNA, 20 nt, synthetic construct
  source 1..20: mol_type = other RNA
gggccgggacacggaagtgt

SEQ ID NO: 1245 - RNA, 20 nt, synthetic construct
  source 1..20: mol_type = other RNA
gggcgaaggactcggggagc

SEQ ID NO: 1246 - RNA, 20 nt, synthetic construct
  source 1..20: mol_type = other RNA
gggcgaggaggggctgagat

SEQ ID NO: 1247 - RNA, 20 nt, synthetic construct
  source 1..20: mol_type = other RNA
gggcgccgtggatggagcag

SEQ ID NO: 1248 - RNA, 20 nt, synthetic construct
  source 1..20: mol_type = other RNA
gggctgagatcggcccgacc

SEQ ID NO: 1249 - RNA, 20 nt, synthetic construct
  source 1..20: mol_type = other RNA
ggggagccccgcttcatctc

SEQ ID NO: 1250 - RNA, 20 nt, synthetic construct
  source 1..20: mol_type = other RNA
ggggcgaaggactcggggag

SEQ ID NO: 1251 - RNA, 20 nt, synthetic construct
  source 1..20: mol_type = other RNA
ggggcgaggaggggctgaga

SEQ ID NO: 1252 - RNA, 20 nt, synthetic construct
  source 1..20: mol_type = other RNA
ggggctgagatcggcccgac

SEQ ID NO: 1253 - RNA, 20 nt, synthetic construct
  source 1..20: mol_type = other RNA
gggggcgaaggactcgggga

SEQ ID NO: 1254 - RNA, 20 nt, synthetic construct
  source 1..20: mol_type = other RNA
gggggcgaggaggggctgag

SEQ ID NO: 1255 - RNA, 20 nt, synthetic construct
  source 1..20: mol_type = other RNA
ggggtcactcaccggcctcg

SEQ ID NO: 1256 - RNA, 20 nt, synthetic construct
  source 1..20: mol_type = other RNA
ggggtcagagtattgggacc

SEQ ID NO: 1257 - RNA, 20 nt, synthetic construct
  source 1..20: mol_type = other RNA
ggggtcgtgacctgctcccc

SEQ ID NO: 1258 - RNA, 20 nt, synthetic construct
  source 1..20: mol_type = other RNA
gggtcactcaccggcctcgc

SEQ ID NO: 1259 - RNA, 20 nt, synthetic construct
  source 1..20: mol_type = other RNA
gggtcagagtattgggaccg

SEQ ID NO: 1260 - RNA, 20 nt, synthetic construct
  source 1..20: mol_type = other RNA
gggtcgggccgatctcagcc

SEQ ID NO: 1261 - RNA, 20 nt, synthetic construct
  source 1..20: mol_type = other RNA
gggtcgtgacctgctcccct

SEQ ID NO: 1262 - RNA, 20 nt, synthetic construct
  source 1..20: mol_type = other RNA
gggtgtcgtccacgtagccc

SEQ ID NO: 1263 - RNA, 20 nt, synthetic construct
  source 1..20: mol_type = other RNA
ggtcactcaccggcctcgct

SEQ ID NO: 1264 - RNA, 20 nt, synthetic construct
  source 1..20: mol_type = other RNA
ggtcagagtattgggaccgg

SEQ ID NO: 1265 - RNA, 20 nt, synthetic construct
  source 1..20: mol_type = other RNA
ggtcccaatactctgacccc

SEQ ID NO: 1266 - RNA, 20 nt, synthetic construct
  source 1..20: mol_type = other RNA
ggtcgggccgatctcagccc

SEQ ID NO: 1267 - RNA, 20 nt, synthetic construct
  source 1..20: mol_type = other RNA
ggtcgtgacctgctcccctg

SEQ ID NO: 1268 - RNA, 20 nt, synthetic construct
  source 1..20: mol_type = other RNA
ggtgagtgaccccggccagg

SEQ ID NO: 1269 - RNA, 20 nt, synthetic construct
  source 1..20: mol_type = other RNA
ggtgtccctggcgctccgtg

SEQ ID NO: 1270 - RNA, 20 nt, synthetic construct
  source 1..20: mol_type = other RNA
ggtgtcgtccacgtagccca

SEQ ID NO: 1271 - RNA, 20 nt, synthetic construct
  source 1..20: mol_type = other RNA
gtagcccacagagatgaagc

SEQ ID NO: 1272 - RNA, 20 nt, synthetic construct
  source 1..20: mol_type = other RNA
gtagccgcgcagcgtccgca

SEQ ID NO: 1273 - RNA, 20 nt, synthetic construct
  source 1..20: mol_type = other RNA
gtagtagccgcgcagcgtcc

SEQ ID NO: 1274 - RNA, 20 nt, synthetic construct
  source 1..20: mol_type = other RNA
gtattgggaccgggagacac

SEQ ID NO: 1275 - RNA, 20 nt, synthetic construct
  source 1..20: mol_type = other RNA
gtatttccacacttccgtgt

SEQ ID NO: 1276 - RNA, 20 nt, synthetic construct
  source 1..20: mol_type = other RNA
gtcactcaccggcctcgctc

SEQ ID NO: 1277 - RNA, 20 nt, synthetic construct
  source 1..20: mol_type = other RNA
gtcagagtattgggaccggg

SEQ ID NO: 1278 - RNA, 20 nt, synthetic construct
  source 1..20: mol_type = other RNA
gtccacgtagcccacagaga

SEQ ID NO: 1279 - RNA, 20 nt, synthetic construct
  source 1..20: mol_type = other RNA
gtcccaatactctgacccct

SEQ ID NO: 1280 - RNA, 20 nt, synthetic construct
  source 1..20: mol_type = other RNA
gtccctggcgctccgtgtct

SEQ ID NO: 1281 - RNA, 20 nt, synthetic construct
  source 1..20: mol_type = other RNA
gtccgaggatggtgccgcgg

SEQ ID NO: 1282 - RNA, 20 nt, synthetic construct
  source 1..20: mol_type = other RNA
gtccgcagattcactcggaa

SEQ ID NO: 1283 - RNA, 20 nt, synthetic construct
  source 1..20: mol_type = other RNA
gtcgaagcgcacgaactggg

SEQ ID NO: 1284 - RNA, 20 nt, synthetic construct
  source 1..20: mol_type = other RNA
gtcgggccgatctcagcccc

SEQ ID NO: 1285 - RNA, 20 nt, synthetic construct
  source 1..20: mol_type = other RNA
gtcgtccacgtagcccacag

SEQ ID NO: 1286 - RNA, 20 nt, synthetic construct
  source 1..20: mol_type = other RNA
gtcgtgacctgctcccctgg

SEQ ID NO: 1287 - RNA, 20 nt, synthetic construct
  source 1..20: mol_type = other RNA
gtcgttgtcgaagcgcacga

SEQ ID NO: 1288 - RNA, 20 nt, synthetic construct
  source 1..20: mol_type = other RNA
gtctcccggtcccaatactc

SEQ ID NO: 1289 - RNA, 20 nt, synthetic construct
  source 1..20: mol_type = other RNA
gtgaatctgcggacgctgcg

SEQ ID NO: 1290 - RNA, 20 nt, synthetic construct
  source 1..20: mol_type = other RNA
gtgaccccggccaggggagc

SEQ ID NO: 1291 - RNA, 20 nt, synthetic construct
  source 1..20: mol_type = other RNA
gtgacctgctcccctggccg

SEQ ID NO: 1292 - RNA, 20 nt, synthetic construct
  source 1..20: mol_type = other RNA
gtgagtgaccccggccaggg

SEQ ID NO: 1293 - RNA, 20 nt, synthetic construct
  source 1..20: mol_type = other RNA
gtgccgcgggcgccgtggat

SEQ ID NO: 1294 - RNA, 20 nt, synthetic construct
  source 1..20: mol_type = other RNA
gtgcgcttcgacaacgacgc

SEQ ID NO: 1295 - RNA, 20 nt, synthetic construct
  source 1..20: mol_type = other RNA
gtgcggtgtccctggcgctc

SEQ ID NO: 1296 - RNA, 20 nt, synthetic construct
  source 1..20: mol_type = other RNA
gtggaaatacttcaaggagt

SEQ ID NO: 1297 - RNA, 20 nt, synthetic construct
  source 1..20: mol_type = other RNA
gtggacgacacccagttcgt

SEQ ID NO: 1298 - RNA, 20 nt, synthetic construct
  source 1..20: mol_type = other RNA
gtggatggagcaggaggggt

SEQ ID NO: 1299 - RNA, 20 nt, synthetic construct
  source 1..20: mol_type = other RNA
gtgtccctggcgctccgtgt

SEQ ID NO: 1300 - RNA, 20 nt, synthetic construct
  source 1..20: mol_type = other RNA
gtgtcgtccacgtagcccac

SEQ ID NO: 1301 - RNA, 20 nt, synthetic construct
  source 1..20: mol_type = other RNA
gtgtctcccggtcccaatac

SEQ ID NO: 1302 - RNA, 20 nt, synthetic construct
  source 1..20: mol_type = other RNA
gtgtggaaatacttcaagga

SEQ ID NO: 1303 - RNA, 20 nt, synthetic construct
  source 1..20: mol_type = other RNA
gttcgtgcgcttcgacaacg

SEQ ID NO: 1304 - RNA, 20 nt, synthetic construct
  source 1..20: mol_type = other RNA
gttgtcgaagcgcacgaact

SEQ ID NO: 1305 - RNA, 20 nt, synthetic construct
  source 1..20: mol_type = other RNA
tacaatcagagcgaggccgg

SEQ ID NO: 1306 - RNA, 20 nt, synthetic construct
  source 1..20: mol_type = other RNA
tacgtggacgacacccagtt

SEQ ID NO: 1307 - RNA, 20 nt, synthetic construct
  source 1..20: mol_type = other RNA
tactacaatcagagcgaggc

SEQ ID NO: 1308 - RNA, 20 nt, synthetic construct
  source 1..20: mol_type = other RNA
tactctgacccctcctgctc

SEQ ID NO: 1309 - RNA, 20 nt, synthetic construct
  source 1..20: mol_type = other RNA
tacttcaaggagtgggagcc

SEQ ID NO: 1310 - RNA, 20 nt, synthetic construct
  source 1..20: mol_type = other RNA
tagcccacagagatgaagcg

SEQ ID NO: 1311 - RNA, 20 nt, synthetic construct
  source 1..20: mol_type = other RNA
tagccgcgcagcgtccgcag

SEQ ID NO: 1312 - RNA, 20 nt, synthetic construct
  source 1..20: mol_type = other RNA
tagtagccgcgcagcgtccg

SEQ ID NO: 1313 - RNA, 20 nt, synthetic construct
  source 1..20: mol_type = other RNA
tattgggaccgggagacacg

SEQ ID NO: 1314 - RNA, 20 nt, synthetic construct
  source 1..20: mol_type = other RNA
tatttccacacttccgtgtc

SEQ ID NO: 1315 - RNA, 20 nt, synthetic construct
  source 1..20: mol_type = other RNA
tcaccggcctcgctctgatt

SEQ ID NO: 1316 - RNA, 20 nt, synthetic construct
  source 1..20: mol_type = other RNA
tcactcaccggcctcgctct

SEQ ID NO: 1317 - RNA, 20 nt, synthetic construct
  source 1..20: mol_type = other RNA
tcactcggaaaatctgtgcg

SEQ ID NO: 1318 - RNA, 20 nt, synthetic construct
  source 1..20: mol_type = other RNA
tcagagcgaggccggtgagt

SEQ ID NO: 1319 - RNA, 20 nt, synthetic construct
  source 1..20: mol_type = other RNA
tcagagtattgggaccggga

SEQ ID NO: 1320 - RNA, 20 nt, synthetic construct
  source 1..20: mol_type = other RNA
tcatctctgtgggctacgtg

SEQ ID NO: 1321 - RNA, 20 nt, synthetic construct
  source 1..20: mol_type = other RNA
tccacacttccgtgtcccgg

SEQ ID NO: 1322 - RNA, 20 nt, synthetic construct
  source 1..20: mol_type = other RNA
tccacgtagcccacagagat

SEQ ID NO: 1323 - RNA, 20 nt, synthetic construct
  source 1..20: mol_type = other RNA
tccatccacggcgcccgcgg

SEQ ID NO: 1324 - RNA, 20 nt, synthetic construct
  source 1..20: mol_type = other RNA
tcccaatactctgacccctc

SEQ ID NO: 1325 - RNA, 20 nt, synthetic construct
  source 1..20: mol_type = other RNA
tcccactccttgaagtattt

SEQ ID NO: 1326 - RNA, 20 nt, synthetic construct
  source 1..20: mol_type = other RNA
tcccctggccggggtcactc

SEQ ID NO: 1327 - RNA, 20 nt, synthetic construct
  source 1..20: mol_type = other RNA
tcccggtcccaatactctga

SEQ ID NO: 1328 - RNA, 20 nt, synthetic construct
  source 1..20: mol_type = other RNA
tccctggcgctccgtgtctc

SEQ ID NO: 1329 - RNA, 20 nt, synthetic construct
  source 1..20: mol_type = other RNA
tccgaggatggtgccgcggg

SEQ ID NO: 1330 - RNA, 20 nt, synthetic construct
  source 1..20: mol_type = other RNA
tccgagtgaatctgcggacg

SEQ ID NO: 1331 - RNA, 20 nt, synthetic construct
  source 1..20: mol_type = other RNA
tccgcagattcactcggaaa

SEQ ID NO: 1332 - RNA, 20 nt, synthetic construct
  source 1..20: mol_type = other RNA
tccgtgtctcccggtcccaa

SEQ ID NO: 1333 - RNA, 20 nt, synthetic construct
  source 1..20: mol_type = other RNA
tcctcggactcgcggcgtcg

SEQ ID NO: 1334 - RNA, 20 nt, synthetic construct
  source 1..20: mol_type = other RNA
tcctgctccatccacggcgc

SEQ ID NO: 1335 - RNA, 20 nt, synthetic construct
  source 1..20: mol_type = other RNA
tccttgaagtatttccacac

SEQ ID NO: 1336 - RNA, 20 nt, synthetic construct
  source 1..20: mol_type = other RNA
tcgaagcgcacgaactgggt

SEQ ID NO: 1337 - RNA, 20 nt, synthetic construct
  source 1..20: mol_type = other RNA
tcgacaacgacgccgcgagt

SEQ ID NO: 1338 - RNA, 20 nt, synthetic construct
  source 1..20: mol_type = other RNA
tcgcccccaggctcccactc

SEQ ID NO: 1339 - RNA, 20 nt, synthetic construct
  source 1..20: mol_type = other RNA
tcgcggcgtcgttgtcgaag

SEQ ID NO: 1340 - RNA, 20 nt, synthetic construct
  source 1..20: mol_type = other RNA
tcgctctgattgtagtagcc

SEQ ID NO: 1341 - RNA, 20 nt, synthetic construct
  source 1..20: mol_type = other RNA
tcggaaaatctgtgcggtgt

SEQ ID NO: 1342 - RNA, 20 nt, synthetic construct
  source 1..20: mol_type = other RNA
tcggactcgcggcgtcgttg

SEQ ID NO: 1343 - RNA, 20 nt, synthetic construct
  source 1..20: mol_type = other RNA
tcggcccgaccctcctcccg

SEQ ID NO: 1344 - RNA, 20 nt, synthetic construct
  source 1..20: mol_type = other RNA
tcgggccgatctcagcccct

SEQ ID NO: 1345 - RNA, 20 nt, synthetic construct
  source 1..20: mol_type = other RNA
tcgtccacgtagcccacaga

SEQ ID NO: 1346 - RNA, 20 nt, synthetic construct
  source 1..20: mol_type = other RNA
tcgtgacctgctcccctggc

SEQ ID NO: 1347 - RNA, 20 nt, synthetic construct
  source 1..20: mol_type = other RNA
tcgtgcgcttcgacaacgac

SEQ ID NO: 1348 - RNA, 20 nt, synthetic construct
  source 1..20: mol_type = other RNA
tcgttgtcgaagcgcacgaa

SEQ ID NO: 1349 - RNA, 20 nt, synthetic construct
  source 1..20: mol_type = other RNA
tctcccggtcccaatactct

SEQ ID NO: 1350 - RNA, 20 nt, synthetic construct
  source 1..20: mol_type = other RNA
tctctgtgggctacgtggac

SEQ ID NO: 1351 - RNA, 20 nt, synthetic construct
  source 1..20: mol_type = other RNA
tctgacccctcctgctccat

SEQ ID NO: 1352 - RNA, 20 nt, synthetic construct
  source 1..20: mol_type = other RNA
tctgattgtagtagccgcgc

SEQ ID NO: 1353 - RNA, 20 nt, synthetic construct
  source 1..20: mol_type = other RNA
tctgcggacgctgcgcggct

SEQ ID NO: 1354 - RNA, 20 nt, synthetic construct
  source 1..20: mol_type = other RNA
tctgtgcggtgtccctggcg

SEQ ID NO: 1355 - RNA, 20 nt, synthetic construct
  source 1..20: mol_type = other RNA
tctgtgggctacgtggacga

SEQ ID NO: 1356 - RNA, 20 nt, synthetic construct
  source 1..20: mol_type = other RNA
tgaagtatttccacacttcc

SEQ ID NO: 1357 - RNA, 20 nt, synthetic construct
  source 1..20: mol_type = other RNA
tgaatctgcggacgctgcgc

SEQ ID NO: 1358 - RNA, 20 nt, synthetic construct
  source 1..20: mol_type = other RNA
tgaccccggccaggggagca

SEQ ID NO: 1359 - RNA, 20 nt, synthetic construct
  source 1..20: mol_type = other RNA
tgacccctcctgctccatcc

SEQ ID NO: 1360 - RNA, 20 nt, synthetic construct
  source 1..20: mol_type = other RNA
tgacctgctcccctggccgg

SEQ ID NO: 1361 - RNA, 20 nt, synthetic construct
  source 1..20: mol_type = other RNA
tgagatcggcccgaccctcc

SEQ ID NO: 1362 - RNA, 20 nt, synthetic construct
  source 1..20: mol_type = other RNA
tgagtgaccccggccagggg

SEQ ID NO: 1363 - RNA, 20 nt, synthetic construct
  source 1..20: mol_type = other RNA
tgattgtagtagccgcgcag

SEQ ID NO: 1364 - RNA, 20 nt, synthetic construct
  source 1..20: mol_type = other RNA
tgccgcgggcgccgtggatg

SEQ ID NO: 1365 - RNA, 20 nt, synthetic construct
  source 1..20: mol_type = other RNA
tgcgcggctactacaatcag

SEQ ID NO: 1366 - RNA, 20 nt, synthetic construct
  source 1..20: mol_type = other RNA
tgcgcttcgacaacgacgcc

SEQ ID NO: 1367 - RNA, 20 nt, synthetic construct
  source 1..20: mol_type = other RNA
tgcggacgctgcgcggctac

SEQ ID NO: 1368 - RNA, 20 nt, synthetic construct
  source 1..20: mol_type = other RNA
tgcggtgtccctggcgctcc

SEQ ID NO: 1369 - RNA, 20 nt, synthetic construct
  source 1..20: mol_type = other RNA
tgctccatccacggcgcccg

SEQ ID NO: 1370 - RNA, 20 nt, synthetic construct
  source 1..20: mol_type = other RNA
tgctcccctggccggggtca

SEQ ID NO: 1371 - RNA, 20 nt, synthetic construct
  source 1..20: mol_type = other RNA
tggaaatacttcaaggagtg

SEQ ID NO: 1372 - RNA, 20 nt, synthetic construct
  source 1..20: mol_type = other RNA
tggacgacacccagttcgtg

SEQ ID NO: 1373 - RNA, 20 nt, synthetic construct
  source 1..20: mol_type = other RNA
tggagcaggaggggtcagag

SEQ ID NO: 1374 - RNA, 20 nt, synthetic construct
  source 1..20: mol_type = other RNA
tggatggagcaggaggggtc

SEQ ID NO: 1375 - RNA, 20 nt, synthetic construct
  source 1..20: mol_type = other RNA
tggccggggtcactcaccgg

SEQ ID NO: 1376 - RNA, 20 nt, synthetic construct
  source 1..20: mol_type = other RNA
tggcgctccgtgtctcccgg

SEQ ID NO: 1377 - RNA, 20 nt, synthetic construct
  source 1..20: mol_type = other RNA
tgggaccgggagacacggag

SEQ ID NO: 1378 - RNA, 20 nt, synthetic construct
  source 1..20: mol_type = other RNA
tgggggcgaggaggggctga

SEQ ID NO: 1379 - RNA, 20 nt, synthetic construct
  source 1..20: mol_type = other RNA
tgggtgtcgtccacgtagcc

SEQ ID NO: 1380 - RNA, 20 nt, synthetic construct
  source 1..20: mol_type = other RNA
tgtagtagccgcgcagcgtc

SEQ ID NO: 1381 - RNA, 20 nt, synthetic construct
  source 1..20: mol_type = other RNA
tgtccctggcgctccgtgtc

SEQ ID NO: 1382 - RNA, 20 nt, synthetic construct
  source 1..20: mol_type = other RNA
tgtcgaagcgcacgaactgg

SEQ ID NO: 1383 - RNA, 20 nt, synthetic construct
  source 1..20: mol_type = other RNA
tgtcgtccacgtagcccaca

SEQ ID NO: 1384 - RNA, 20 nt, synthetic construct
  source 1..20: mol_type = other RNA
tgtctcccggtcccaatact

SEQ ID NO: 1385 - RNA, 20 nt, synthetic construct
  source 1..20: mol_type = other RNA
tgtgcggtgtccctggcgct

SEQ ID NO: 1386 - RNA, 20 nt, synthetic construct
  source 1..20: mol_type = other RNA
tgtggaaatacttcaaggag

SEQ ID NO: 1387 - RNA, 20 nt, synthetic construct
  source 1..20: mol_type = other RNA
tgtgggctacgtggacgaca

SEQ ID NO: 1388 - RNA, 20 nt, synthetic construct
  source 1..20: mol_type = other RNA
ttcaaggagtgggagcctgg

SEQ ID NO: 1389 - RNA, 20 nt, synthetic construct
  source 1..20: mol_type = other RNA
ttcactcggaaaatctgtgc

SEQ ID NO: 1390 - RNA, 20 nt, synthetic construct
  source 1..20: mol_type = other RNA
ttcatctctgtgggctacgt

SEQ ID NO: 1391 - RNA, 20 nt, synthetic construct
  source 1..20: mol_type = other RNA
ttccacacttccgtgtcccg

SEQ ID NO: 1392 - RNA, 20 nt, synthetic construct
  source 1..20: mol_type = other RNA
ttccgagtgaatctgcggac

SEQ ID NO: 1393 - RNA, 20 nt, synthetic construct
  source 1..20: mol_type = other RNA
ttccgtgtcccggcccggcc

SEQ ID NO: 1394 - RNA, 20 nt, synthetic construct
  source 1..20: mol_type = other RNA
ttcgacaacgacgccgcgag

SEQ ID NO: 1395 - RNA, 20 nt, synthetic construct
  source 1..20: mol_type = other RNA
ttcgtgcgcttcgacaacga

SEQ ID NO: 1396 - RNA, 20 nt, synthetic construct
  source 1..20: mol_type = other RNA
ttgaagtatttccacacttc

SEQ ID NO: 1397 - RNA, 20 nt, synthetic construct
  source 1..20: mol_type = other RNA
ttgggaccgggagacacgga

SEQ ID NO: 1398 - RNA, 20 nt, synthetic construct
  source 1..20: mol_type = other RNA
ttgtagtagccgcgcagcgt

SEQ ID NO: 1399 - RNA, 20 nt, synthetic construct
  source 1..20: mol_type = other RNA
ttgtcgaagcgcacgaactg

SEQ ID NO: 1400 - RNA, 20 nt, synthetic construct
  source 1..20: mol_type = other RNA
tttccacacttccgtgtccc

SEQ ID NO: 1401 - RNA, 20 nt, synthetic construct
  source 1..20: mol_type = other RNA
tttccgagtgaatctgcgga

SEQ ID NO: 1402 - RNA, 20 nt, synthetic construct
  source 1..20: mol_type = other RNA
ttttccgagtgaatctgcgg

SEQ ID NO: 1403 - RNA, 21 nt, synthetic construct
  source 1..21: mol_type = other RNA
aaaatctgtgcggtgtccctg

SEQ ID NO: 1404 - RNA, 21 nt, synthetic construct
  source 1..21: mol_type = other RNA
aaatacttcaaggagtgggag

SEQ ID NO: 1405 - RNA, 21 nt, synthetic construct
  source 1..21: mol_type = other RNA
aaatctgtgcggtgtccctgg

SEQ ID NO: 1406 - RNA, 21 nt, synthetic construct
  source 1..21: mol_type = other RNA
aacgacgccgcgagtccgagg

SEQ ID NO: 1407 - RNA, 21 nt, synthetic construct
  source 1..21: mol_type = other RNA
aactgggtgtcgtccacgtag

SEQ ID NO: 1408 - RNA, 21 nt, synthetic construct
  source 1..21: mol_type = other RNA
aagcgcacgaactgggtgtcg

SEQ ID NO: 1409 - RNA, 21 nt, synthetic construct
  source 1..21: mol_type = other RNA
aaggactcggggagccgcgcc

SEQ ID NO: 1410 - RNA, 21 nt, synthetic construct
  source 1..21: mol_type = other RNA
aagtatttccacacttccgtg

SEQ ID NO: 1411 - RNA, 21 nt, synthetic construct
  source 1..21: mol_type = other RNA
aagtgtggaaatacttcaagg

SEQ ID NO: 1412 - RNA, 21 nt, synthetic construct
  source 1..21: mol_type = other RNA
aatactctgacccctcctgct

SEQ ID NO: 1413 - RNA, 21 nt, synthetic construct
  source 1..21: mol_type = other RNA
aatacttcaaggagtgggagc

SEQ ID NO: 1414 - RNA, 21 nt, synthetic construct
  source 1..21: mol_type = other RNA
aatcagagcgaggccggtgag

SEQ ID NO: 1415 - RNA, 21 nt, synthetic construct
  source 1..21: mol_type = other RNA
aatctgcggacgctgcgcggc

SEQ ID NO: 1416 - RNA, 21 nt, synthetic construct
  source 1..21: mol_type = other RNA
aatctgtgcggtgtccctggc

SEQ ID NO: 1417 - RNA, 21 nt, synthetic construct
  source 1..21: mol_type = other RNA
acaacgacgccgcgagtccga

SEQ ID NO: 1418 - RNA, 21 nt, synthetic construct
  source 1..21: mol_type = other RNA
acaatcagagcgaggccggtg

SEQ ID NO: 1419 - RNA, 21 nt, synthetic construct
  source 1..21: mol_type = other RNA
acacccagttcgtgcgcttcg

SEQ ID NO: 1420 - RNA, 21 nt, synthetic construct
  source 1..21: mol_type = other RNA
acaccgcacagattttccgag

SEQ ID NO: 1421 - RNA, 21 nt, synthetic construct
  source 1..21: mol_type = other RNA
acacggaagtgtggaaatact

SEQ ID NO: 1422 - RNA, 21 nt, synthetic construct
  source 1..21: mol_type = other RNA
acacggagcgccagggacacc

SEQ ID NO: 1423 - RNA, 21 nt, synthetic construct
  source 1..21: mol_type = other RNA
acacttccgtgtcccggcccg

SEQ ID NO: 1424 - RNA, 21 nt, synthetic construct
  source 1..21: mol_type = other RNA
acagagatgaagcggggctcc

SEQ ID NO: 1425 - RNA, 21 nt, synthetic construct
  source 1..21: mol_type = other RNA
acagattttccgagtgaatct

SEQ ID NO: 1426 - RNA, 21 nt, synthetic construct
  source 1..21: mol_type = other RNA
accatcctcggactcgcggcg

SEQ ID NO: 1427 - RNA, 21 nt, synthetic construct
  source 1..21: mol_type = other RNA
acccagttcgtgcgcttcgac

SEQ ID NO: 1428 - RNA, 21 nt, synthetic construct
  source 1..21: mol_type = other RNA
accccggccaggggagcaggt

SEQ ID NO: 1429 - RNA, 21 nt, synthetic construct
  source 1..21: mol_type = other RNA
acccctcctgctccatccacg

SEQ ID NO: 1430 - RNA, 21 nt, synthetic construct
  source 1..21: mol_type = other RNA
accgcacagattttccgagtg

SEQ ID NO: 1431 - RNA, 21 nt, synthetic construct
  source 1..21: mol_type = other RNA
accggcctcgctctgattgta

SEQ ID NO: 1432 - RNA, 21 nt, synthetic construct
  source 1..21: mol_type = other RNA
accgggagacacggagcgcca

SEQ ID NO: 1433 - RNA, 21 nt, synthetic construct
  source 1..21: mol_type = other RNA
acctgctcccctggccggggt

SEQ ID NO: 1434 - RNA, 21 nt, synthetic construct
  source 1..21: mol_type = other RNA
acgacacccagttcgtgcgct

SEQ ID NO: 1435 - RNA, 21 nt, synthetic construct
  source 1..21: mol_type = other RNA
acgacgccgcgagtccgagga

SEQ ID NO: 1436 - RNA, 21 nt, synthetic construct
  source 1..21: mol_type = other RNA
acgccgcgagtccgaggatgg

SEQ ID NO: 1437 - RNA, 21 nt, synthetic construct
  source 1..21: mol_type = other RNA
acgctgcgcggctactacaat

SEQ ID NO: 1438 - RNA, 21 nt, synthetic construct
  source 1..21: mol_type = other RNA
acggaagtgtggaaatacttc

SEQ ID NO: 1439 - RNA, 21 nt, synthetic construct
  source 1..21: mol_type = other RNA
acggagcgccagggacaccgc

SEQ ID NO: 1440 - RNA, 21 nt, synthetic construct
  source 1..21: mol_type = other RNA
acgtagcccacagagatgaag

SEQ ID NO: 1441 - RNA, 21 nt, synthetic construct
  source 1..21: mol_type = other RNA
acgtggacgacacccagttcg

SEQ ID NO: 1442 - RNA, 21 nt, synthetic construct
  source 1..21: mol_type = other RNA
actacaatcagagcgaggccg

SEQ ID NO: 1443 - RNA, 21 nt, synthetic construct
  source 1..21: mol_type = other RNA
actcaccggcctcgctctgat

SEQ ID NO: 1444 - RNA, 21 nt, synthetic construct
  source 1..21: mol_type = other RNA
actccttgaagtatttccaca

SEQ ID NO: 1445 - RNA, 21 nt, synthetic construct
  source 1..21: mol_type = other RNA
actcgcggcgtcgttgtcgaa

SEQ ID NO: 1446 - RNA, 21 nt, synthetic construct
  source 1..21: mol_type = other RNA
actcggaaaatctgtgcggtg

SEQ ID NO: 1447 - RNA, 21 nt, synthetic construct
  source 1..21: mol_type = other RNA
actctgacccctcctgctcca

SEQ ID NO: 1448 - RNA, 21 nt, synthetic construct
  source 1..21: mol_type = other RNA
actgggtgtcgtccacgtagc

SEQ ID NO: 1449 - RNA, 21 nt, synthetic construct
  source 1..21: mol_type = other RNA
acttcaaggagtgggagcctg

SEQ ID NO: 1450 - RNA, 21 nt, synthetic construct
  source 1..21: mol_type = other RNA
acttccgtgtcccggcccggc

SEQ ID NO: 1451 - RNA, 21 nt, synthetic construct
  source 1..21: mol_type = other RNA
agacacggagcgccagggaca

SEQ ID NO: 1452 - RNA, 21 nt, synthetic construct
  source 1..21: mol_type = other RNA
agagatgaagcggggctcccc

SEQ ID NO: 1453 - RNA, 21 nt, synthetic construct
  source 1..21: mol_type = other RNA
agagcgaggccggtgagtgac

SEQ ID NO: 1454 - RNA, 21 nt, synthetic construct
  source 1..21: mol_type = other RNA
agagtattgggaccgggagac

SEQ ID NO: 1455 - RNA, 21 nt, synthetic construct
  source 1..21: mol_type = other RNA
agatcggcccgaccctcctcc

SEQ ID NO: 1456 - RNA, 21 nt, synthetic construct
  source 1..21: mol_type = other RNA
agattcactcggaaaatctgt

SEQ ID NO: 1457 - RNA, 21 nt, synthetic construct
  source 1..21: mol_type = other RNA
agattttccgagtgaatctgc

SEQ ID NO: 1458 - RNA, 21 nt, synthetic construct
  source 1..21: mol_type = other RNA
agcaggaggggtcagagtatt

SEQ ID NO: 1459 - RNA, 21 nt, synthetic construct
  source 1..21: mol_type = other RNA
agcccacagagatgaagcggg

SEQ ID NO: 1460 - RNA, 21 nt, synthetic construct
  source 1..21: mol_type = other RNA
agccccgcttcatctctgtgg

SEQ ID NO: 1461 - RNA, 21 nt, synthetic construct
  source 1..21: mol_type = other RNA
agccgcgcagcgtccgcagat

SEQ ID NO: 1462 - RNA, 21 nt, synthetic construct
  source 1..21: mol_type = other RNA
agcgaggccggtgagtgaccc

SEQ ID NO: 1463 - RNA, 21 nt, synthetic construct
  source 1..21: mol_type = other RNA
agcgcacgaactgggtgtcgt

SEQ ID NO: 1464 - RNA, 21 nt, synthetic construct
  source 1..21: mol_type = other RNA
agcgccagggacaccgcacag

SEQ ID NO: 1465 - RNA, 21 nt, synthetic construct
  source 1..21: mol_type = other RNA
agcgtccgcagattcactcgg

SEQ ID NO: 1466 - RNA, 21 nt, synthetic construct
  source 1..21: mol_type = other RNA
aggaggggctgagatcggccc

SEQ ID NO: 1467 - RNA, 21 nt, synthetic construct
  source 1..21: mol_type = other RNA
aggaggggtcagagtattggg

SEQ ID NO: 1468 - RNA, 21 nt, synthetic construct
  source 1..21: mol_type = other RNA
aggagggtcgggccgatctca

SEQ ID NO: 1469 - RNA, 21 nt, synthetic construct
  source 1..21: mol_type = other RNA
aggccggtgagtgaccccggc

SEQ ID NO: 1470 - RNA, 21 nt, synthetic construct
  source 1..21: mol_type = other RNA
aggctcccactccttgaagta

SEQ ID NO: 1471 - RNA, 21 nt, synthetic construct
  source 1..21: mol_type = other RNA
agggacaccgcacagattttc

SEQ ID NO: 1472 - RNA, 21 nt, synthetic construct
  source 1..21: mol_type = other RNA
aggggctgagatcggcccgac

SEQ ID NO: 1473 - RNA, 21 nt, synthetic construct
  source 1..21: mol_type = other RNA
aggggtcagagtattgggacc

SEQ ID NO: 1474 - RNA, 21 nt, synthetic construct
  source 1..21: mol_type = other RNA
aggggtcgtgacctgctcccc

SEQ ID NO: 1475 - RNA, 21 nt, synthetic construct
  source 1..21: mol_type = other RNA
agggtcgggccgatctcagcc

SEQ ID NO: 1476 - RNA, 21 nt, synthetic construct
  source 1..21: mol_type = other RNA
agtagccgcgcagcgtccgca

SEQ ID NO: 1477 - RNA, 21 nt, synthetic construct
  source 1..21: mol_type = other RNA
agtattgggaccgggagacac

SEQ ID NO: 1478 - RNA, 21 nt, synthetic construct
  source 1..21: mol_type = other RNA
agtatttccacacttccgtgt

SEQ ID NO: 1479 - RNA, 21 nt, synthetic construct
  source 1..21: mol_type = other RNA
agtccgaggatggtgccgcgg

SEQ ID NO: 1480 - RNA, 21 nt, synthetic construct
  source 1..21: mol_type = other RNA
agtgaatctgcggacgctgcg

SEQ ID NO: 1481 - RNA, 21 nt, synthetic construct
  source 1..21: mol_type = other RNA
agtgaccccggccaggggagc

SEQ ID NO: 1482 - RNA, 21 nt, synthetic construct
  source 1..21: mol_type = other RNA
agtgtggaaatacttcaagga

SEQ ID NO: 1483 - RNA, 21 nt, synthetic construct
  source 1..21: mol_type = other RNA
agttcgtgcgcttcgacaacg

SEQ ID NO: 1484 - RNA, 21 nt, synthetic construct
  source 1..21: mol_type = other RNA
atactctgacccctcctgctc

SEQ ID NO: 1485 - RNA, 21 nt, synthetic construct
  source 1..21: mol_type = other RNA
atacttcaaggagtgggagcc

SEQ ID NO: 1486 - RNA, 21 nt, synthetic construct
  source 1..21: mol_type = other RNA
atcagagcgaggccggtgagt

SEQ ID NO: 1487 - RNA, 21 nt, synthetic construct
  source 1..21: mol_type = other RNA
atcctcggactcgcggcgtcg

SEQ ID NO: 1488 - RNA, 21 nt, synthetic construct
  source 1..21: mol_type = other RNA
atcggcccgaccctcctcccg

SEQ ID NO: 1489 - RNA, 21 nt, synthetic construct
  source 1..21: mol_type = other RNA
atctcagcccctcctcgcccc

SEQ ID NO: 1490 - RNA, 21 nt, synthetic construct
  source 1..21: mol_type = other RNA
atctctgtgggctacgtggac

SEQ ID NO: 1491 - RNA, 21 nt, synthetic construct
  source 1..21: mol_type = other RNA
atctgcggacgctgcgcggct

SEQ ID NO: 1492 - RNA, 21 nt, synthetic construct
  source 1..21: mol_type = other RNA
atctgtgcggtgtccctggcg

SEQ ID NO: 1493 - RNA, 21 nt, synthetic construct
  source 1..21: mol_type = other RNA
atggagcaggaggggtcagag

SEQ ID NO: 1494 - RNA, 21 nt, synthetic construct
  source 1..21: mol_type = other RNA
attcactcggaaaatctgtgc

SEQ ID NO: 1495 - RNA, 21 nt, synthetic construct
  source 1..21: mol_type = other RNA
attgggaccgggagacacgga

SEQ ID NO: 1496 - RNA, 21 nt, synthetic construct
  source 1..21: mol_type = other RNA
attgtagtagccgcgcagcgt

SEQ ID NO: 1497 - RNA, 21 nt, synthetic construct
  source 1..21: mol_type = other RNA
atttccacacttccgtgtccc

SEQ ID NO: 1498 - RNA, 21 nt, synthetic construct
  source 1..21: mol_type = other RNA
attttccgagtgaatctgcgg

SEQ ID NO: 1499 - RNA, 21 nt, synthetic construct
  source 1..21: mol_type = other RNA
caacgacgccgcgagtccgag

SEQ ID NO: 1500 - RNA, 21 nt, synthetic construct
  source 1..21: mol_type = other RNA
caatactctgacccctcctgc

SEQ ID NO: 1501 - RNA, 21 nt, synthetic construct
  source 1..21: mol_type = other RNA
caatcagagcgaggccggtga

SEQ ID NO: 1502 - RNA, 21 nt, synthetic construct
  source 1..21: mol_type = other RNA
cacacttccgtgtcccggccc

SEQ ID NO: 1503 - RNA, 21 nt, synthetic construct
  source 1..21: mol_type = other RNA
cacagagatgaagcggggctc

SEQ ID NO: 1504 - RNA, 21 nt, synthetic construct
  source 1..21: mol_type = other RNA
cacagattttccgagtgaatc

SEQ ID NO: 1505 - RNA, 21 nt, synthetic construct
  source 1..21: mol_type = other RNA
caccatcctcggactcgcggc

SEQ ID NO: 1506 - RNA, 21 nt, synthetic construct
  source 1..21: mol_type = other RNA
cacccagttcgtgcgcttcga

SEQ ID NO: 1507 - RNA, 21 nt, synthetic construct
  source 1..21: mol_type = other RNA
caccgcacagattttccgagt

SEQ ID NO: 1508 - RNA, 21 nt, synthetic construct
  source 1..21: mol_type = other RNA
caccggcctcgctctgattgt

SEQ ID NO: 1509 - RNA, 21 nt, synthetic construct
  source 1..21: mol_type = other RNA
cacggaagtgtggaaatactt

SEQ ID NO: 1510 - RNA, 21 nt, synthetic construct
  source 1..21: mol_type = other RNA
cacggagcgccagggacaccg

SEQ ID NO: 1511 - RNA, 21 nt, synthetic construct
  source 1..21: mol_type = other RNA
cacgtagcccacagagatgaa

SEQ ID NO: 1512 - RNA, 21 nt, synthetic construct
  source 1..21: mol_type = other RNA
cactcaccggcctcgctctga

SEQ ID NO: 1513 - RNA, 21 nt, synthetic construct
  source 1..21: mol_type = other RNA
cactccttgaagtatttccac

SEQ ID NO: 1514 - RNA, 21 nt, synthetic construct
  source 1..21: mol_type = other RNA
cactcggaaaatctgtgcggt

SEQ ID NO: 1515 - RNA, 21 nt, synthetic construct
  source 1..21: mol_type = other RNA
cacttccgtgtcccggcccgg

SEQ ID NO: 1516 - RNA, 21 nt, synthetic construct
  source 1..21: mol_type = other RNA
cagagatgaagcggggctccc

SEQ ID NO: 1517 - RNA, 21 nt, synthetic construct
  source 1..21: mol_type = other RNA
cagagtattgggaccgggaga

SEQ ID NO: 1518 - RNA, 21 nt, synthetic construct
  source 1..21: mol_type = other RNA
cagattcactcggaaaatctg

SEQ ID NO: 1519 - RNA, 21 nt, synthetic construct
  source 1..21: mol_type = other RNA
cagattttccgagtgaatctg

SEQ ID NO: 1520 - RNA, 21 nt, synthetic construct
  source 1..21: mol_type = other RNA
cagcgtccgcagattcactcg

SEQ ID NO: 1521 - RNA, 21 nt, synthetic construct
  source 1..21: mol_type = other RNA
caggaggggtcagagtattgg

SEQ ID NO: 1522 - RNA, 21 nt, synthetic construct
  source 1..21: mol_type = other RNA
caggctcccactccttgaagt

SEQ ID NO: 1523 - RNA, 21 nt, synthetic construct
  source 1..21: mol_type = other RNA
cagggacaccgcacagatttt

SEQ ID NO: 1524 - RNA, 21 nt, synthetic construct
  source 1..21: mol_type = other RNA
cagttcgtgcgcttcgacaac

SEQ ID NO: 1525 - RNA, 21 nt, synthetic construct
  source 1..21: mol_type = other RNA
catcctcggactcgcggcgtc

SEQ ID NO: 1526 - RNA, 21 nt, synthetic construct
  source 1..21: mol_type = other RNA
catctctgtgggctacgtgga

SEQ ID NO: 1527 - RNA, 21 nt, synthetic construct
  source 1..21: mol_type = other RNA
ccaatactctgacccctcctg

SEQ ID NO: 1528 - RNA, 21 nt, synthetic construct
  source 1..21: mol_type = other RNA
ccacacttccgtgtcccggcc

SEQ ID NO: 1529 - RNA, 21 nt, synthetic construct
  source 1..21: mol_type = other RNA
ccacagagatgaagcggggct

SEQ ID NO: 1530 - RNA, 21 nt, synthetic construct
  source 1..21: mol_type = other RNA
ccacgtagcccacagagatga

SEQ ID NO: 1531 - RNA, 21 nt, synthetic construct
  source 1..21: mol_type = other RNA
ccactccttgaagtatttcca

SEQ ID NO: 1532 - RNA, 21 nt, synthetic construct
  source 1..21: mol_type = other RNA
ccaggctcccactccttgaag

SEQ ID NO: 1533 - RNA, 21 nt, synthetic construct
  source 1..21: mol_type = other RNA
ccagggacaccgcacagattt

SEQ ID NO: 1534 - RNA, 21 nt, synthetic construct
  source 1..21: mol_type = other RNA
ccagttcgtgcgcttcgacaa

SEQ ID NO: 1535 - RNA, 21 nt, synthetic construct
  source 1..21: mol_type = other RNA
ccatcctcggactcgcggcgt

SEQ ID NO: 1536 - RNA, 21 nt, synthetic construct
  source 1..21: mol_type = other RNA
cccaatactctgacccctcct

SEQ ID NO: 1537 - RNA, 21 nt, synthetic construct
  source 1..21: mol_type = other RNA
cccacagagatgaagcggggc

SEQ ID NO: 1538 - RNA, 21 nt, synthetic construct
  source 1..21: mol_type = other RNA
cccactccttgaagtatttcc

SEQ ID NO: 1539 - RNA, 21 nt, synthetic construct
  source 1..21: mol_type = other RNA
cccaggctcccactccttgaa

SEQ ID NO: 1540 - RNA, 21 nt, synthetic construct
  source 1..21: mol_type = other RNA
cccagttcgtgcgcttcgaca

SEQ ID NO: 1541 - RNA, 21 nt, synthetic construct
  source 1..21: mol_type = other RNA
ccccaggctcccactccttga

SEQ ID NO: 1542 - RNA, 21 nt, synthetic construct
  source 1..21: mol_type = other RNA
cccccaggctcccactccttg

SEQ ID NO: 1543 - RNA, 21 nt, synthetic construct
  source 1..21: mol_type = other RNA
ccccgcttcatctctgtgggc

SEQ ID NO: 1544 - RNA, 21 nt, synthetic construct
  source 1..21: mol_type = other RNA
cccctggccggggtcactcac

SEQ ID NO: 1545 - RNA, 21 nt, synthetic construct
  source 1..21: mol_type = other RNA
cccgcggcaccatcctcggac

SEQ ID NO: 1546 - RNA, 21 nt, synthetic construct
  source 1..21: mol_type = other RNA
cccgcttcatctctgtgggct

SEQ ID NO: 1547 - RNA, 21 nt, synthetic construct
  source 1..21: mol_type = other RNA
cccggccaggggagcaggtca

SEQ ID NO: 1548 - RNA, 21 nt, synthetic construct
  source 1..21: mol_type = other RNA
cccggtcccaatactctgacc

SEQ ID NO: 1549 - RNA, 21 nt, synthetic construct
  source 1..21: mol_type = other RNA
ccctggccggggtcactcacc

SEQ ID NO: 1550 - RNA, 21 nt, synthetic construct
  source 1..21: mol_type = other RNA
ccctggcgctccgtgtctccc

SEQ ID NO: 1551 - RNA, 21 nt, synthetic construct
  source 1..21: mol_type = other RNA
ccgagtgaatctgcggacgct

SEQ ID NO: 1552 - RNA, 21 nt, synthetic construct
  source 1..21: mol_type = other RNA
ccgatctcagcccctcctcgc

SEQ ID NO: 1553 - RNA, 21 nt, synthetic construct
  source 1..21: mol_type = other RNA
ccgcacagattttccgagtga

SEQ ID NO: 1554 - RNA, 21 nt, synthetic construct
  source 1..21: mol_type = other RNA
ccgcagattcactcggaaaat

SEQ ID NO: 1555 - RNA, 21 nt, synthetic construct
  source 1..21: mol_type = other RNA
ccgcgagtccgaggatggtgc

SEQ ID NO: 1556 - RNA, 21 nt, synthetic construct
  source 1..21: mol_type = other RNA
ccgcgcagcgtccgcagattc

SEQ ID NO: 1557 - RNA, 21 nt, synthetic construct
  source 1..21: mol_type = other RNA
ccgcggcaccatcctcggact

SEQ ID NO: 1558 - RNA, 21 nt, synthetic construct
  source 1..21: mol_type = other RNA
ccgcggggagccccgcttcat

SEQ ID NO: 1559 - RNA, 21 nt, synthetic construct
  source 1..21: mol_type = other RNA
ccgcttcatctctgtgggcta

SEQ ID NO: 1560 - RNA, 21 nt, synthetic construct
  source 1..21: mol_type = other RNA
ccggcctcgctctgattgtag

SEQ ID NO: 1561 - RNA, 21 nt, synthetic construct
  source 1..21: mol_type = other RNA
ccgggacacggaagtgtggaa

SEQ ID NO: 1562 - RNA, 21 nt, synthetic construct
  source 1..21: mol_type = other RNA
ccgggagacacggagcgccag

SEQ ID NO: 1563 - RNA, 21 nt, synthetic construct
  source 1..21: mol_type = other RNA
ccgggccgggacacggaagtg

SEQ ID NO: 1564 - RNA, 21 nt, synthetic construct
  source 1..21: mol_type = other RNA
ccggggtcactcaccggcctc

SEQ ID NO: 1565 - RNA, 21 nt, synthetic construct
  source 1..21: mol_type = other RNA
ccggtcccaatactctgaccc

SEQ ID NO: 1566 - RNA, 21 nt, synthetic construct
  source 1..21: mol_type = other RNA
ccggtgagtgaccccggccag

SEQ ID NO: 1567 - RNA, 21 nt, synthetic construct
  source 1..21: mol_type = other RNA
ccgtggatggagcaggagggg

SEQ ID NO: 1568 - RNA, 21 nt, synthetic construct
  source 1..21: mol_type = other RNA
ccgtgtctcccggtcccaata

SEQ ID NO: 1569 - RNA, 21 nt, synthetic construct
  source 1..21: mol_type = other RNA
cctcgcccccaggctcccact

SEQ ID NO: 1570 - RNA, 21 nt, synthetic construct
  source 1..21: mol_type = other RNA
cctcgctctgattgtagtagc

SEQ ID NO: 1571 - RNA, 21 nt, synthetic construct
  source 1..21: mol_type = other RNA
cctcggactcgcggcgtcgtt

SEQ ID NO: 1572 - RNA, 21 nt, synthetic construct
  source 1..21: mol_type = other RNA
cctgctccatccacggcgccc

SEQ ID NO: 1573 - RNA, 21 nt, synthetic construct
  source 1..21: mol_type = other RNA
cctggccggggtcactcaccg

SEQ ID NO: 1574 - RNA, 21 nt, synthetic construct
  source 1..21: mol_type = other RNA
cctggcgctccgtgtctcccg

SEQ ID NO: 1575 - RNA, 21 nt, synthetic construct
  source 1..21: mol_type = other RNA
ccttgaagtatttccacactt

SEQ ID NO: 1576 - RNA, 21 nt, synthetic construct
  source 1..21: mol_type = other RNA
cgaactgggtgtcgtccacgt

SEQ ID NO: 1577 - RNA, 21 nt, synthetic construct
  source 1..21: mol_type = other RNA
cgaagcgcacgaactgggtgt

SEQ ID NO: 1578 - RNA, 21 nt, synthetic construct
  source 1..21: mol_type = other RNA
cgaaggactcggggagccgcg

SEQ ID NO: 1579 - RNA, 21 nt, synthetic construct
  source 1..21: mol_type = other RNA
cgacaacgacgccgcgagtcc

SEQ ID NO: 1580 - RNA, 21 nt, synthetic construct
  source 1..21: mol_type = other RNA
cgacacccagttcgtgcgctt

SEQ ID NO: 1581 - RNA, 21 nt, synthetic construct
  source 1..21: mol_type = other RNA
cgacgccgcgagtccgaggat

SEQ ID NO: 1582 - RNA, 21 nt, synthetic construct
  source 1..21: mol_type = other RNA
cgaggaggggctgagatcggc

SEQ ID NO: 1583 - RNA, 21 nt, synthetic construct
  source 1..21: mol_type = other RNA
cgaggccggtgagtgaccccg

SEQ ID NO: 1584 - RNA, 21 nt, synthetic construct
  source 1..21: mol_type = other RNA
cgagtccgaggatggtgccgc

SEQ ID NO: 1585 - RNA, 21 nt, synthetic construct
  source 1..21: mol_type = other RNA
cgagtgaatctgcggacgctg

SEQ ID NO: 1586 - RNA, 21 nt, synthetic construct
  source 1..21: mol_type = other RNA
cgatctcagcccctcctcgcc

SEQ ID NO: 1587 - RNA, 21 nt, synthetic construct
  source 1..21: mol_type = other RNA
cgcacagattttccgagtgaa

SEQ ID NO: 1588 - RNA, 21 nt, synthetic construct
  source 1..21: mol_type = other RNA
cgcacgaactgggtgtcgtcc

SEQ ID NO: 1589 - RNA, 21 nt, synthetic construct
  source 1..21: mol_type = other RNA
cgcagattcactcggaaaatc

SEQ ID NO: 1590 - RNA, 21 nt, synthetic construct
  source 1..21: mol_type = other RNA
cgcagcgtccgcagattcact

SEQ ID NO: 1591 - RNA, 21 nt, synthetic construct
  source 1..21: mol_type = other RNA
cgccagggacaccgcacagat

SEQ ID NO: 1592 - RNA, 21 nt, synthetic construct
  source 1..21: mol_type = other RNA
cgcccccaggctcccactcct

SEQ ID NO: 1593 - RNA, 21 nt, synthetic construct
  source 1..21: mol_type = other RNA
cgccgcgagtccgaggatggt

SEQ ID NO: 1594 - RNA, 21 nt, synthetic construct
  source 1..21: mol_type = other RNA
cgccgtggatggagcaggagg

SEQ ID NO: 1595 - RNA, 21 nt, synthetic construct
  source 1..21: mol_type = other RNA
cgcgagtccgaggatggtgcc

SEQ ID NO: 1596 - RNA, 21 nt, synthetic construct
  source 1..21: mol_type = other RNA
cgcgcagcgtccgcagattca

SEQ ID NO: 1597 - RNA, 21 nt, synthetic construct
  source 1..21: mol_type = other RNA
cgcggcaccatcctcggactc

SEQ ID NO: 1598 - RNA, 21 nt, synthetic construct
  source 1..21: mol_type = other RNA
cgcggcgtcgttgtcgaagcg

SEQ ID NO: 1599 - RNA, 21 nt, synthetic construct
  source 1..21: mol_type = other RNA
cgcggctactacaatcagagc

SEQ ID NO: 1600 - RNA, 21 nt, synthetic construct
  source 1..21: mol_type = other RNA
cgcggggagccccgcttcatc

SEQ ID NO: 1601 - RNA, 21 nt, synthetic construct
  source 1..21: mol_type = other RNA
cgctccgtgtctcccggtccc

SEQ ID NO: 1602 - RNA, 21 nt, synthetic construct
  source 1..21: mol_type = other RNA
cgctctgattgtagtagccgc

SEQ ID NO: 1603 - RNA, 21 nt, synthetic construct
  source 1..21: mol_type = other RNA
cgctgcgcggctactacaatc

SEQ ID NO: 1604 - RNA, 21 nt, synthetic construct
  source 1..21: mol_type = other RNA
cgcttcatctctgtgggctac

SEQ ID NO: 1605 - RNA, 21 nt, synthetic construct
  source 1..21: mol_type = other RNA
cgcttcgacaacgacgccgcg

SEQ ID NO: 1606 - RNA, 21 nt, synthetic construct
  source 1..21: mol_type = other RNA
cggaaaatctgtgcggtgtcc

SEQ ID NO: 1607 - RNA, 21 nt, synthetic construct
  source 1..21: mol_type = other RNA
cggaagtgtggaaatacttca

SEQ ID NO: 1608 - RNA, 21 nt, synthetic construct
  source 1..21: mol_type = other RNA
cggacgctgcgcggctactac

SEQ ID NO: 1609 - RNA, 21 nt, synthetic construct
  source 1..21: mol_type = other RNA
cggactcgcggcgtcgttgtc

SEQ ID NO: 1610 - RNA, 21 nt, synthetic construct
  source 1..21: mol_type = other RNA
cggagcgccagggacaccgca

SEQ ID NO: 1611 - RNA, 21 nt, synthetic construct
  source 1..21: mol_type = other RNA
cggcaccatcctcggactcgc

SEQ ID NO: 1612 - RNA, 21 nt, synthetic construct
  source 1..21: mol_type = other RNA
cggcctcgctctgattgtagt

SEQ ID NO: 1613 - RNA, 21 nt, synthetic construct
  source 1..21: mol_type = other RNA
cggcgtcgttgtcgaagcgca

SEQ ID NO: 1614 - RNA, 21 nt, synthetic construct
  source 1..21: mol_type = other RNA
cggctactacaatcagagcga

SEQ ID NO: 1615 - RNA, 21 nt, synthetic construct
  source 1..21: mol_type = other RNA
cgggacacggaagtgtggaaa

SEQ ID NO: 1616 - RNA, 21 nt, synthetic construct
  source 1..21: mol_type = other RNA
cgggagacacggagcgccagg

SEQ ID NO: 1617 - RNA, 21 nt, synthetic construct
  source 1..21: mol_type = other RNA
cgggaggagggtcgggccgat

SEQ ID NO: 1618 - RNA, 21 nt, synthetic construct
  source 1..21: mol_type = other RNA
cgggccgatctcagcccctcc

SEQ ID NO: 1619 - RNA, 21 nt, synthetic construct
  source 1..21: mol_type = other RNA
cgggccgggacacggaagtgt

SEQ ID NO: 1620 - RNA, 21 nt, synthetic construct
  source 1..21: mol_type = other RNA
cgggcgccgtggatggagcag

SEQ ID NO: 1621 - RNA, 21 nt, synthetic construct
  source 1..21: mol_type = other RNA
cggggagccccgcttcatctc

SEQ ID NO: 1622 - RNA, 21 nt, synthetic construct
  source 1..21: mol_type = other RNA
cggggtcactcaccggcctcg

SEQ ID NO: 1623 - RNA, 21 nt, synthetic construct
  source 1..21: mol_type = other RNA
cggtcccaatactctgacccc

SEQ ID NO: 1624 - RNA, 21 nt, synthetic construct
  source 1..21: mol_type = other RNA
cggtgagtgaccccggccagg

SEQ ID NO: 1625 - RNA, 21 nt, synthetic construct
  source 1..21: mol_type = other RNA
cggtgtccctggcgctccgtg

SEQ ID NO: 1626 - RNA, 21 nt, synthetic construct
  source 1..21: mol_type = other RNA
cgtagcccacagagatgaagc

SEQ ID NO: 1627 - RNA, 21 nt, synthetic construct
  source 1..21: mol_type = other RNA
cgtccacgtagcccacagaga

SEQ ID NO: 1628 - RNA, 21 nt, synthetic construct
  source 1..21: mol_type = other RNA
cgtccgcagattcactcggaa

SEQ ID NO: 1629 - RNA, 21 nt, synthetic construct
  source 1..21: mol_type = other RNA
cgtcgttgtcgaagcgcacga

SEQ ID NO: 1630 - RNA, 21 nt, synthetic construct
  source 1..21: mol_type = other RNA
cgtgacctgctcccctggccg

SEQ ID NO: 1631 - RNA, 21 nt, synthetic construct
  source 1..21: mol_type = other RNA
cgtgcgcttcgacaacgacgc

SEQ ID NO: 1632 - RNA, 21 nt, synthetic construct
  source 1..21: mol_type = other RNA
cgtggacgacacccagttcgt

SEQ ID NO: 1633 - RNA, 21 nt, synthetic construct
  source 1..21: mol_type = other RNA
cgtggatggagcaggaggggt

SEQ ID NO: 1634 - RNA, 21 nt, synthetic construct
  source 1..21: mol_type = other RNA
cgtgtctcccggtcccaatac

SEQ ID NO: 1635 - RNA, 21 nt, synthetic construct
  source 1..21: mol_type = other RNA
cgttgtcgaagcgcacgaact

SEQ ID NO: 1636 - RNA, 21 nt, synthetic construct
  source 1..21: mol_type = other RNA
ctacaatcagagcgaggccgg

SEQ ID NO: 1637 - RNA, 21 nt, synthetic construct
  source 1..21: mol_type = other RNA
ctacgtggacgacacccagtt

SEQ ID NO: 1638 - RNA, 21 nt, synthetic construct
  source 1..21: mol_type = other RNA
ctactacaatcagagcgaggc

SEQ ID NO: 1639 - RNA, 21 nt, synthetic construct
  source 1..21: mol_type = other RNA
ctcaccggcctcgctctgatt

SEQ ID NO: 1640 - RNA, 21 nt, synthetic construct
  source 1..21: mol_type = other RNA
ctcccactccttgaagtattt

SEQ ID NO: 1641 - RNA, 21 nt, synthetic construct
  source 1..21: mol_type = other RNA
ctcccctggccggggtcactc

SEQ ID NO: 1642 - RNA, 21 nt, synthetic construct
  source 1..21: mol_type = other RNA
ctcccggtcccaatactctga

SEQ ID NO: 1643 - RNA, 21 nt, synthetic construct
  source 1..21: mol_type = other RNA
ctccgtgtctcccggtcccaa

SEQ ID NO: 1644 - RNA, 21 nt, synthetic construct
  source 1..21: mol_type = other RNA
ctcctgctccatccacggcgc

SEQ ID NO: 1645 - RNA, 21 nt, synthetic construct
  source 1..21: mol_type = other RNA
ctccttgaagtatttccacac

SEQ ID NO: 1646 - RNA, 21 nt, synthetic construct
  source 1..21: mol_type = other RNA
ctcgcccccaggctcccactc

SEQ ID NO: 1647 - RNA, 21 nt, synthetic construct
  source 1..21: mol_type = other RNA
ctcgcggcgtcgttgtcgaag

SEQ ID NO: 1648 - RNA, 21 nt, synthetic construct
  source 1..21: mol_type = other RNA
ctcgctctgattgtagtagcc

SEQ ID NO: 1649 - RNA, 21 nt, synthetic construct
  source 1..21: mol_type = other RNA
ctcggaaaatctgtgcggtgt

SEQ ID NO: 1650 - RNA, 21 nt, synthetic construct
  source 1..21: mol_type = other RNA
ctcggactcgcggcgtcgttg

SEQ ID NO: 1651 - RNA, 21 nt, synthetic construct
  source 1..21: mol_type = other RNA
ctctgacccctcctgctccat

SEQ ID NO: 1652 - RNA, 21 nt, synthetic construct
  source 1..21: mol_type = other RNA
ctctgattgtagtagccgcgc

SEQ ID NO: 1653 - RNA, 21 nt, synthetic construct
  source 1..21: mol_type = other RNA
ctctgtgggctacgtggacga

SEQ ID NO: 1654 - RNA, 21 nt, synthetic construct
  source 1..21: mol_type = other RNA
ctgacccctcctgctccatcc

SEQ ID NO: 1655 - RNA, 21 nt, synthetic construct
  source 1..21: mol_type = other RNA
ctgagatcggcccgaccctcc

SEQ ID NO: 1656 - RNA, 21 nt, synthetic construct
  source 1..21: mol_type = other RNA
ctgattgtagtagccgcgcag

SEQ ID NO: 1657 - RNA, 21 nt, synthetic construct
  source 1..21: mol_type = other RNA
ctgcgcggctactacaatcag

SEQ ID NO: 1658 - RNA, 21 nt, synthetic construct
  source 1..21: mol_type = other RNA
ctgcggacgctgcgcggctac

SEQ ID NO: 1659 - RNA, 21 nt, synthetic construct
  source 1..21: mol_type = other RNA
ctgctccatccacggcgcccg

SEQ ID NO: 1660 - RNA, 21 nt, synthetic construct
  source 1..21: mol_type = other RNA
ctgctcccctggccggggtca

SEQ ID NO: 1661 - RNA, 21 nt, synthetic construct
  source 1..21: mol_type = other RNA
ctggccggggtcactcaccgg

SEQ ID NO: 1662 - RNA, 21 nt, synthetic construct
  source 1..21: mol_type = other RNA
ctggcgctccgtgtctcccgg

SEQ ID NO: 1663 - RNA, 21 nt, synthetic construct
  source 1..21: mol_type = other RNA
ctgggggcgaggaggggctga

SEQ ID NO: 1664 - RNA, 21 nt, synthetic construct
  source 1..21: mol_type = other RNA
ctgggtgtcgtccacgtagcc

SEQ ID NO: 1665 - RNA, 21 nt, synthetic construct
  source 1..21: mol_type = other RNA
ctgtgcggtgtccctggcgct

SEQ ID NO: 1666 - RNA, 21 nt, synthetic construct
  source 1..21: mol_type = other RNA
ctgtgggctacgtggacgaca

SEQ ID NO: 1667 - RNA, 21 nt, synthetic construct
  source 1..21: mol_type = other RNA
cttcaaggagtgggagcctgg

SEQ ID NO: 1668 - RNA, 21 nt, synthetic construct
  source 1..21: mol_type = other RNA
cttcatctctgtgggctacgt

SEQ ID NO: 1669 - RNA, 21 nt, synthetic construct
  source 1..21: mol_type = other RNA
cttcgacaacgacgccgcgag

SEQ ID NO: 1670 - RNA, 21 nt, synthetic construct
  source 1..21: mol_type = other RNA
cttgaagtatttccacacttc

SEQ ID NO: 1671 - RNA, 21 nt, synthetic construct
  source 1..21: mol_type = other RNA
gaaaatctgtgcggtgtccct

SEQ ID NO: 1672 - RNA, 21 nt, synthetic construct
  source 1..21: mol_type = other RNA
gaaatacttcaaggagtggga

SEQ ID NO: 1673 - RNA, 21 nt, synthetic construct
  source 1..21: mol_type = other RNA
gaactgggtgtcgtccacgta

SEQ ID NO: 1674 - RNA, 21 nt, synthetic construct
  source 1..21: mol_type = other RNA
gaagcgcacgaactgggtgtc

SEQ ID NO: 1675 - RNA, 21 nt, synthetic construct
  source 1..21: mol_type = other RNA
gaaggactcggggagccgcgc

SEQ ID NO: 1676 - RNA, 21 nt, synthetic construct
  source 1..21: mol_type = other RNA
gaagtatttccacacttccgt

SEQ ID NO: 1677 - RNA, 21 nt, synthetic construct
  source 1..21: mol_type = other RNA
gaagtgtggaaatacttcaag

SEQ ID NO: 1678 - RNA, 21 nt, synthetic construct
  source 1..21: mol_type = other RNA
gaatctgcggacgctgcgcgg

SEQ ID NO: 1679 - RNA, 21 nt, synthetic construct
  source 1..21: mol_type = other RNA
gacaacgacgccgcgagtccg

SEQ ID NO: 1680 - RNA, 21 nt, synthetic construct
  source 1..21: mol_type = other RNA
gacacccagttcgtgcgcttc

SEQ ID NO: 1681 - RNA, 21 nt, synthetic construct
  source 1..21: mol_type = other RNA
gacaccgcacagattttccga

SEQ ID NO: 1682 - RNA, 21 nt, synthetic construct
  source 1..21: mol_type = other RNA
gacacggaagtgtggaaatac

SEQ ID NO: 1683 - RNA, 21 nt, synthetic construct
  source 1..21: mol_type = other RNA
gacacggagcgccagggacac

SEQ ID NO: 1684 - RNA, 21 nt, synthetic construct
  source 1..21: mol_type = other RNA
gacccctcctgctccatccac

SEQ ID NO: 1685 - RNA, 21 nt, synthetic construct
  source 1..21: mol_type = other RNA
gaccgggagacacggagcgcc

SEQ ID NO: 1686 - RNA, 21 nt, synthetic construct
  source 1..21: mol_type = other RNA
gacgacacccagttcgtgcgc

SEQ ID NO: 1687 - RNA, 21 nt, synthetic construct
  source 1..21: mol_type = other RNA
gacgccgcgagtccgaggatg

SEQ ID NO: 1688 - RNA, 21 nt, synthetic construct
  source 1..21: mol_type = other RNA
gacgctgcgcggctactacaa

SEQ ID NO: 1689 - RNA, 21 nt, synthetic construct
  source 1..21: mol_type = other RNA
gactcgcggcgtcgttgtcga

SEQ ID NO: 1690 - RNA, 21 nt, synthetic construct
  source 1..21: mol_type = other RNA
gagacacggagcgccagggac

SEQ ID NO: 1691 - RNA, 21 nt, synthetic construct
  source 1..21: mol_type = other RNA
gagatcggcccgaccctcctc

SEQ ID NO: 1692 - RNA, 21 nt, synthetic construct
  source 1..21: mol_type = other RNA
gagcaggaggggtcagagtat

SEQ ID NO: 1693 - RNA, 21 nt, synthetic construct
  source 1..21: mol_type = other RNA
gagccccgcttcatctctgtg

SEQ ID NO: 1694 - RNA, 21 nt, synthetic construct
  source 1..21: mol_type = other RNA
gagcgaggccggtgagtgacc

SEQ ID NO: 1695 - RNA, 21 nt, synthetic construct
  source 1..21: mol_type = other RNA
gagcgccagggacaccgcaca

SEQ ID NO: 1696 - RNA, 21 nt, synthetic construct
  source 1..21: mol_type = other RNA
gaggaggggctgagatcggcc

SEQ ID NO: 1697 - RNA, 21 nt, synthetic construct
  source 1..21: mol_type = other RNA
gaggagggtcgggccgatctc

SEQ ID NO: 1698 - RNA, 21 nt, synthetic construct
  source 1..21: mol_type = other RNA
gaggccggtgagtgaccccgg

SEQ ID NO: 1699 - RNA, 21 nt, synthetic construct
  source 1..21: mol_type = other RNA
gaggggctgagatcggcccga

SEQ ID NO: 1700 - RNA, 21 nt, synthetic construct
  source 1..21: mol_type = other RNA
gaggggtcagagtattgggac

SEQ ID NO: 1701 - RNA, 21 nt, synthetic construct
  source 1..21: mol_type = other RNA
gagggtcgggccgatctcagc

SEQ ID NO: 1702 - RNA, 21 nt, synthetic construct
  source 1..21: mol_type = other RNA
gagtattgggaccgggagaca

SEQ ID NO: 1703 - RNA, 21 nt, synthetic construct
  source 1..21: mol_type = other RNA
gagtccgaggatggtgccgcg

SEQ ID NO: 1704 - RNA, 21 nt, synthetic construct
  source 1..21: mol_type = other RNA
gagtgaatctgcggacgctgc

SEQ ID NO: 1705 - RNA, 21 nt, synthetic construct
  source 1..21: mol_type = other RNA
gagtgaccccggccaggggag

SEQ ID NO: 1706 - RNA, 21 nt, synthetic construct
  source 1..21: mol_type = other RNA
gatcggcccgaccctcctccc

SEQ ID NO: 1707 - RNA, 21 nt, synthetic construct
  source 1..21: mol_type = other RNA
gatctcagcccctcctcgccc

SEQ ID NO: 1708 - RNA, 21 nt, synthetic construct
  source 1..21: mol_type = other RNA
gatggagcaggaggggtcaga

SEQ ID NO: 1709 - RNA, 21 nt, synthetic construct
  source 1..21: mol_type = other RNA
gattcactcggaaaatctgtg

SEQ ID NO: 1710 - RNA, 21 nt, synthetic construct
  source 1..21: mol_type = other RNA
gattgtagtagccgcgcagcg

SEQ ID NO: 1711 - RNA, 21 nt, synthetic construct
  source 1..21: mol_type = other RNA
gattttccgagtgaatctgcg

SEQ ID NO: 1712 - RNA, 21 nt, synthetic construct
  source 1..21: mol_type = other RNA
gcacagattttccgagtgaat

SEQ ID NO: 1713 - RNA, 21 nt, synthetic construct
  source 1..21: mol_type = other RNA
gcaccatcctcggactcgcgg

SEQ ID NO: 1714 - RNA, 21 nt, synthetic construct
  source 1..21: mol_type = other RNA
gcacgaactgggtgtcgtcca

SEQ ID NO: 1715 - RNA, 21 nt, synthetic construct
  source 1..21: mol_type = other RNA
gcagattcactcggaaaatct

SEQ ID NO: 1716 - RNA, 21 nt, synthetic construct
  source 1..21: mol_type = other RNA
gcagcgtccgcagattcactc

SEQ ID NO: 1717 - RNA, 21 nt, synthetic construct
  source 1..21: mol_type = other RNA
gcaggaggggtcagagtattg

SEQ ID NO: 1718 - RNA, 21 nt, synthetic construct
  source 1..21: mol_type = other RNA
gccagggacaccgcacagatt

SEQ ID NO: 1719 - RNA, 21 nt, synthetic construct
  source 1..21: mol_type = other RNA
gcccacagagatgaagcgggg

SEQ ID NO: 1720 - RNA, 21 nt, synthetic construct
  source 1..21: mol_type = other RNA
gcccccaggctcccactcctt

SEQ ID NO: 1721 - RNA, 21 nt, synthetic construct
  source 1..21: mol_type = other RNA
gccccgcttcatctctgtggg

SEQ ID NO: 1722 - RNA, 21 nt, synthetic construct
  source 1..21: mol_type = other RNA
gcccgcggcaccatcctcgga

SEQ ID NO: 1723 - RNA, 21 nt, synthetic construct
  source 1..21: mol_type = other RNA
gccgatctcagcccctcctcg

SEQ ID NO: 1724 - RNA, 21 nt, synthetic construct
  source 1..21: mol_type = other RNA
gccgcgagtccgaggatggtg

SEQ ID NO: 1725 - RNA, 21 nt, synthetic construct
  source 1..21: mol_type = other RNA
gccgcgcagcgtccgcagatt

SEQ ID NO: 1726 - RNA, 21 nt, synthetic construct
  source 1..21: mol_type = other RNA
gccgggacacggaagtgtgga

SEQ ID NO: 1727 - RNA, 21 nt, synthetic construct
  source 1..21: mol_type = other RNA
gccgggccgggacacggaagt

SEQ ID NO: 1728 - RNA, 21 nt, synthetic construct
  source 1..21: mol_type = other RNA
gccggggtcactcaccggcct

SEQ ID NO: 1729 - RNA, 21 nt, synthetic construct
  source 1..21: mol_type = other RNA
gccggtgagtgaccccggcca

SEQ ID NO: 1730 - RNA, 21 nt, synthetic construct
  source 1..21: mol_type = other RNA
gccgtggatggagcaggaggg

SEQ ID NO: 1731 - RNA, 21 nt, synthetic construct
  source 1..21: mol_type = other RNA
gcctcgctctgattgtagtag

SEQ ID NO: 1732 - RNA, 21 nt, synthetic construct
  source 1..21: mol_type = other RNA
gcgaaggactcggggagccgc

SEQ ID NO: 1733 - RNA, 21 nt, synthetic construct
  source 1..21: mol_type = other RNA
gcgaggaggggctgagatcgg

SEQ ID NO: 1734 - RNA, 21 nt, synthetic construct
  source 1..21: mol_type = other RNA
gcgaggccggtgagtgacccc

SEQ ID NO: 1735 - RNA, 21 nt, synthetic construct
  source 1..21: mol_type = other RNA
gcgagtccgaggatggtgccg

SEQ ID NO: 1736 - RNA, 21 nt, synthetic construct
  source 1..21: mol_type = other RNA
gcgcacgaactgggtgtcgtc

SEQ ID NO: 1737 - RNA, 21 nt, synthetic construct
  source 1..21: mol_type = other RNA
gcgcagcgtccgcagattcac

SEQ ID NO: 1738 - RNA, 21 nt, synthetic construct
  source 1..21: mol_type = other RNA
gcgccagggacaccgcacaga

SEQ ID NO: 1739 - RNA, 21 nt, synthetic construct
  source 1..21: mol_type = other RNA
gcgccgtggatggagcaggag

SEQ ID NO: 1740 - RNA, 21 nt, synthetic construct
  source 1..21: mol_type = other RNA
gcgcggctactacaatcagag

SEQ ID NO: 1741 - RNA, 21 nt, synthetic construct
  source 1..21: mol_type = other RNA
gcgctccgtgtctcccggtcc

SEQ ID NO: 1742 - RNA, 21 nt, synthetic construct
  source 1..21: mol_type = other RNA
gcgcttcgacaacgacgccgc

SEQ ID NO: 1743 - RNA, 21 nt, synthetic construct
  source 1..21: mol_type = other RNA
gcggacgctgcgcggctacta

SEQ ID NO: 1744 - RNA, 21 nt, synthetic construct
  source 1..21: mol_type = other RNA
gcggcaccatcctcggactcg

SEQ ID NO: 1745 - RNA, 21 nt, synthetic construct
  source 1..21: mol_type = other RNA
gcggcgtcgttgtcgaagcgc

SEQ ID NO: 1746 - RNA, 21 nt, synthetic construct
  source 1..21: mol_type = other RNA
gcggctactacaatcagagcg

SEQ ID NO: 1747 - RNA, 21 nt, synthetic construct
  source 1..21: mol_type = other RNA
gcgggcgccgtggatggagca

SEQ ID NO: 1748 - RNA, 21 nt, synthetic construct
  source 1..21: mol_type = other RNA
gcggggagccccgcttcatct

SEQ ID NO: 1749 - RNA, 21 nt, synthetic construct
  source 1..21: mol_type = other RNA
gcggtgtccctggcgctccgt

SEQ ID NO: 1750 - RNA, 21 nt, synthetic construct
  source 1..21: mol_type = other RNA
gcgtccgcagattcactcgga

SEQ ID NO: 1751 - RNA, 21 nt, synthetic construct
  source 1..21: mol_type = other RNA
gcgtcgttgtcgaagcgcacg

SEQ ID NO: 1752 - RNA, 21 nt, synthetic construct
  source 1..21: mol_type = other RNA
gctacgtggacgacacccagt

SEQ ID NO: 1753 - RNA, 21 nt, synthetic construct
  source 1..21: mol_type = other RNA
gctactacaatcagagcgagg

SEQ ID NO: 1754 - RNA, 21 nt, synthetic construct
  source 1..21: mol_type = other RNA
gctcccactccttgaagtatt

SEQ ID NO: 1755 - RNA, 21 nt, synthetic construct
  source 1..21: mol_type = other RNA
gctcccctggccggggtcact

SEQ ID NO: 1756 - RNA, 21 nt, synthetic construct
  source 1..21: mol_type = other RNA
gctccgtgtctcccggtccca

SEQ ID NO: 1757 - RNA, 21 nt, synthetic construct
  source 1..21: mol_type = other RNA
gctctgattgtagtagccgcg

SEQ ID NO: 1758 - RNA, 21 nt, synthetic construct
  source 1..21: mol_type = other RNA
gctgagatcggcccgaccctc

SEQ ID NO: 1759 - RNA, 21 nt, synthetic construct
  source 1..21: mol_type = other RNA
gctgcgcggctactacaatca

SEQ ID NO: 1760 - RNA, 21 nt, synthetic construct
  source 1..21: mol_type = other RNA
gcttcatctctgtgggctacg

SEQ ID NO: 1761 - RNA, 21 nt, synthetic construct
  source 1..21: mol_type = other RNA
gcttcgacaacgacgccgcga

SEQ ID NO: 1762 - RNA, 21 nt, synthetic construct
  source 1..21: mol_type = other RNA
ggaaaatctgtgcggtgtccc

SEQ ID NO: 1763 - RNA, 21 nt, synthetic construct
  source 1..21: mol_type = other RNA
ggaaatacttcaaggagtggg

SEQ ID NO: 1764 - RNA, 21 nt, synthetic construct
  source 1..21: mol_type = other RNA
ggaagtgtggaaatacttcaa

SEQ ID NO: 1765 - RNA, 21 nt, synthetic construct
  source 1..21: mol_type = other RNA
ggacaccgcacagattttccg

SEQ ID NO: 1766 - RNA, 21 nt, synthetic construct
  source 1..21: mol_type = other RNA
ggacacggaagtgtggaaata

SEQ ID NO: 1767 - RNA, 21 nt, synthetic construct
  source 1..21: mol_type = other RNA
ggaccgggagacacggagcgc

SEQ ID NO: 1768 - RNA, 21 nt, synthetic construct
  source 1..21: mol_type = other RNA
ggacgacacccagttcgtgcg

SEQ ID NO: 1769 - RNA, 21 nt, synthetic construct
  source 1..21: mol_type = other RNA
ggacgctgcgcggctactaca

SEQ ID NO: 1770 - RNA, 21 nt, synthetic construct
  source 1..21: mol_type = other RNA
ggactcgcggcgtcgttgtcg

SEQ ID NO: 1771 - RNA, 21 nt, synthetic construct
  source 1..21: mol_type = other RNA
ggagacacggagcgccaggga

SEQ ID NO: 1772 - RNA, 21 nt, synthetic construct
  source 1..21: mol_type = other RNA
ggagcaggaggggtcagagta

SEQ ID NO: 1773 - RNA, 21 nt, synthetic construct
  source 1..21: mol_type = other RNA
ggagccccgcttcatctctgt

SEQ ID NO: 1774 - RNA, 21 nt, synthetic construct
  source 1..21: mol_type = other RNA
ggagcgccagggacaccgcac

SEQ ID NO: 1775 - RNA, 21 nt, synthetic construct
  source 1..21: mol_type = other RNA
ggaggagggtcgggccgatct

SEQ ID NO: 1776 - RNA, 21 nt, synthetic construct
  source 1..21: mol_type = other RNA
ggaggggctgagatcggcccg

SEQ ID NO: 1777 - RNA, 21 nt, synthetic construct
  source 1..21: mol_type = other RNA
ggaggggtcagagtattggga

SEQ ID NO: 1778 - RNA, 21 nt, synthetic construct
  source 1..21: mol_type = other RNA
ggagggtcgggccgatctcag

SEQ ID NO: 1779 - RNA, 21 nt, synthetic construct
  source 1..21: mol_type = other RNA
ggatggagcaggaggggtcag

SEQ ID NO: 1780 - RNA, 21 nt, synthetic construct
  source 1..21: mol_type = other RNA
ggcaccatcctcggactcgcg

SEQ ID NO: 1781 - RNA, 21 nt, synthetic construct
  source 1..21: mol_type = other RNA
ggccgatctcagcccctcctc

SEQ ID NO: 1782 - RNA, 21 nt, synthetic construct
  source 1..21: mol_type = other RNA
ggccgggacacggaagtgtgg

SEQ ID NO: 1783 - RNA, 21 nt, synthetic construct
  source 1..21: mol_type = other RNA
ggcctcgctctgattgtagta

SEQ ID NO: 1784 - RNA, 21 nt, synthetic construct
  source 1..21: mol_type = other RNA
ggcgaaggactcggggagccg

SEQ ID NO: 1785 - RNA, 21 nt, synthetic construct
  source 1..21: mol_type = other RNA
ggcgaggaggggctgagatcg

SEQ ID NO: 1786 - RNA, 21 nt, synthetic construct
  source 1..21: mol_type = other RNA
ggcgccgtggatggagcagga

SEQ ID NO: 1787 - RNA, 21 nt, synthetic construct
  source 1..21: mol_type = other RNA
ggcgctccgtgtctcccggtc

SEQ ID NO: 1788 - RNA, 21 nt, synthetic construct
  source 1..21: mol_type = other RNA
ggcgtcgttgtcgaagcgcac

SEQ ID NO: 1789 - RNA, 21 nt, synthetic construct
  source 1..21: mol_type = other RNA
ggctacgtggacgacacccag

SEQ ID NO: 1790 - RNA, 21 nt, synthetic construct
  source 1..21: mol_type = other RNA
ggctactacaatcagagcgag

SEQ ID NO: 1791 - RNA, 21 nt, synthetic construct
  source 1..21: mol_type = other RNA
ggctcccactccttgaagtat

SEQ ID NO: 1792 - RNA, 21 nt, synthetic construct
  source 1..21: mol_type = other RNA
ggctgagatcggcccgaccct

SEQ ID NO: 1793 - RNA, 21 nt, synthetic construct
  source 1..21: mol_type = other RNA
gggacaccgcacagattttcc

SEQ ID NO: 1794 - RNA, 21 nt, synthetic construct
  source 1..21: mol_type = other RNA
gggacacggaagtgtggaaat

SEQ ID NO: 1795 - RNA, 21 nt, synthetic construct
  source 1..21: mol_type = other RNA
gggaccgggagacacggagcg

SEQ ID NO: 1796 - RNA, 21 nt, synthetic construct
  source 1..21: mol_type = other RNA
gggagacacggagcgccaggg

SEQ ID NO: 1797 - RNA, 21 nt, synthetic construct
  source 1..21: mol_type = other RNA
gggagccccgcttcatctctg

SEQ ID NO: 1798 - RNA, 21 nt, synthetic construct
  source 1..21: mol_type = other RNA
gggaggagggtcgggccgatc

SEQ ID NO: 1799 - RNA, 21 nt, synthetic construct
  source 1..21: mol_type = other RNA
gggccgatctcagcccctcct

SEQ ID NO: 1800 - RNA, 21 nt, synthetic construct
  source 1..21: mol_type = other RNA
gggccgggacacggaagtgtg

SEQ ID NO: 1801 - RNA, 21 nt, synthetic construct
  source 1..21: mol_type = other RNA
gggcgaaggactcggggagcc

SEQ ID NO: 1802 - RNA, 21 nt, synthetic construct
  source 1..21: mol_type = other RNA
gggcgaggaggggctgagatc

SEQ ID NO: 1803 - RNA, 21 nt, synthetic construct
  source 1..21: mol_type = other RNA
gggcgccgtggatggagcagg

SEQ ID NO: 1804 - RNA, 21 nt, synthetic construct
  source 1..21: mol_type = other RNA
gggctacgtggacgacaccca

SEQ ID NO: 1805 - RNA, 21 nt, synthetic construct
  source 1..21: mol_type = other RNA
gggctgagatcggcccgaccc

SEQ ID NO: 1806 - RNA, 21 nt, synthetic construct
  source 1..21: mol_type = other RNA
ggggagccccgcttcatctct

SEQ ID NO: 1807 - RNA, 21 nt, synthetic construct
  source 1..21: mol_type = other RNA
ggggcgaaggactcggggagc

SEQ ID NO: 1808 - RNA, 21 nt, synthetic construct
  source 1..21: mol_type = other RNA
ggggcgaggaggggctgagat

SEQ ID NO: 1809 - RNA, 21 nt, synthetic construct
  source 1..21: mol_type = other RNA
ggggctgagatcggcccgacc

SEQ ID NO: 1810 - RNA, 21 nt, synthetic construct
  source 1..21: mol_type = other RNA
gggggcgaaggactcggggag

SEQ ID NO: 1811 - RNA, 21 nt, synthetic construct
  source 1..21: mol_type = other RNA
gggggcgaggaggggctgaga

SEQ ID NO: 1812 - RNA, 21 nt, synthetic construct
  source 1..21: mol_type = other RNA
ggggtcactcaccggcctcgc

SEQ ID NO: 1813 - RNA, 21 nt, synthetic construct
  source 1..21: mol_type = other RNA
ggggtcagagtattgggaccg

SEQ ID NO: 1814 - RNA, 21 nt, synthetic construct
  source 1..21: mol_type = other RNA
ggggtcgtgacctgctcccct

SEQ ID NO: 1815 - RNA, 21 nt, synthetic construct
  source 1..21: mol_type = other RNA
gggtcactcaccggcctcgct

SEQ ID NO: 1816 - RNA, 21 nt, synthetic construct
  source 1..21: mol_type = other RNA
gggtcagagtattgggaccgg

SEQ ID NO: 1817 - RNA, 21 nt, synthetic construct
  source 1..21: mol_type = other RNA
gggtcgggccgatctcagccc

SEQ ID NO: 1818 - RNA, 21 nt, synthetic construct
  source 1..21: mol_type = other RNA
gggtcgtgacctgctcccctg

SEQ ID NO: 1819 - RNA, 21 nt, synthetic construct
  source 1..21: mol_type = other RNA
gggtgtcgtccacgtagccca

SEQ ID NO: 1820 - RNA, 21 nt, synthetic construct
  source 1..21: mol_type = other RNA
ggtcactcaccggcctcgctc

SEQ ID NO: 1821 - RNA, 21 nt, synthetic construct
  source 1..21: mol_type = other RNA
ggtcagagtattgggaccggg

SEQ ID NO: 1822 - RNA, 21 nt, synthetic construct
  source 1..21: mol_type = other RNA
ggtcccaatactctgacccct

SEQ ID NO: 1823 - RNA, 21 nt, synthetic construct
  source 1..21: mol_type = other RNA
ggtcgggccgatctcagcccc

SEQ ID NO: 1824 - RNA, 21 nt, synthetic construct
  source 1..21: mol_type = other RNA
ggtcgtgacctgctcccctgg

SEQ ID NO: 1825 - RNA, 21 nt, synthetic construct
  source 1..21: mol_type = other RNA
ggtgagtgaccccggccaggg

SEQ ID NO: 1826 - RNA, 21 nt, synthetic construct
  source 1..21: mol_type = other RNA
ggtgtccctggcgctccgtgt

SEQ ID NO: 1827 - RNA, 21 nt, synthetic construct
  source 1..21: mol_type = other RNA
ggtgtcgtccacgtagcccac

SEQ ID NO: 1828 - RNA, 21 nt, synthetic construct
  source 1..21: mol_type = other RNA
gtagcccacagagatgaagcg

SEQ ID NO: 1829 - RNA, 21 nt, synthetic construct
  source 1..21: mol_type = other RNA
gtagccgcgcagcgtccgcag

SEQ ID NO: 1830 - RNA, 21 nt, synthetic construct
  source 1..21: mol_type = other RNA
gtagtagccgcgcagcgtccg

SEQ ID NO: 1831 - RNA, 21 nt, synthetic construct
  source 1..21: mol_type = other RNA
gtattgggaccgggagacacg

SEQ ID NO: 1832 - RNA, 21 nt, synthetic construct
  source 1..21: mol_type = other RNA
gtatttccacacttccgtgtc

SEQ ID NO: 1833 - RNA, 21 nt, synthetic construct
  source 1..21: mol_type = other RNA
gtcactcaccggcctcgctct

SEQ ID NO: 1834 - RNA, 21 nt, synthetic construct
  source 1..21: mol_type = other RNA
gtcagagtattgggaccggga

SEQ ID NO: 1835 - RNA, 21 nt, synthetic construct
  source 1..21: mol_type = other RNA
gtccacgtagcccacagagat

SEQ ID NO: 1836 - RNA, 21 nt, synthetic construct
  source 1..21: mol_type = other RNA
gtcccaatactctgacccctc

SEQ ID NO: 1837 - RNA, 21 nt, synthetic construct
  source 1..21: mol_type = other RNA
gtccctggcgctccgtgtctc

SEQ ID NO: 1838 - RNA, 21 nt, synthetic construct
  source 1..21: mol_type = other RNA
gtccgaggatggtgccgcggg

SEQ ID NO: 1839 - RNA, 21 nt, synthetic construct
  source 1..21: mol_type = other RNA
gtccgcagattcactcggaaa

SEQ ID NO: 1840 - RNA, 21 nt, synthetic construct
  source 1..21: mol_type = other RNA
gtcgaagcgcacgaactgggt

SEQ ID NO: 1841 - RNA, 21 nt, synthetic construct
  source 1..21: mol_type = other RNA
gtcgggccgatctcagcccct

SEQ ID NO: 1842 - RNA, 21 nt, synthetic construct
  source 1..21: mol_type = other RNA
gtcgtccacgtagcccacaga

SEQ ID NO: 1843 - RNA, 21 nt, synthetic construct
  source 1..21: mol_type = other RNA
gtcgtgacctgctcccctggc

SEQ ID NO: 1844 - RNA, 21 nt, synthetic construct
  source 1..21: mol_type = other RNA
gtcgttgtcgaagcgcacgaa

SEQ ID NO: 1845 - RNA, 21 nt, synthetic construct
  source 1..21: mol_type = other RNA
gtctcccggtcccaatactct

SEQ ID NO: 1846 - RNA, 21 nt, synthetic construct
  source 1..21: mol_type = other RNA
gtgaatctgcggacgctgcgc

SEQ ID NO: 1847 - RNA, 21 nt, synthetic construct
  source 1..21: mol_type = other RNA
gtgaccccggccaggggagca

SEQ ID NO: 1848 - RNA, 21 nt, synthetic construct
  source 1..21: mol_type = other RNA
gtgacctgctcccctggccgg

SEQ ID NO: 1849 - RNA, 21 nt, synthetic construct
  source 1..21: mol_type = other RNA
gtgagtgaccccggccagggg

SEQ ID NO: 1850 - RNA, 21 nt, synthetic construct
  source 1..21: mol_type = other RNA
gtgcgcttcgacaacgacgcc

SEQ ID NO: 1851 - RNA, 21 nt, synthetic construct
  source 1..21: mol_type = other RNA
gtgcggtgtccctggcgctcc

SEQ ID NO: 1852 - RNA, 21 nt, synthetic construct
  source 1..21: mol_type = other RNA
gtggaaatacttcaaggagtg

SEQ ID NO: 1853 - RNA, 21 nt, synthetic construct
  source 1..21: mol_type = other RNA
gtggacgacacccagttcgtg

SEQ ID NO: 1854 - RNA, 21 nt, synthetic construct
  source 1..21: mol_type = other RNA
gtggatggagcaggaggggtc

SEQ ID NO: 1855 - RNA, 21 nt, synthetic construct
  source 1..21: mol_type = other RNA
gtgtccctggcgctccgtgtc

SEQ ID NO: 1856 - RNA, 21 nt, synthetic construct
  source 1..21: mol_type = other RNA
gtgtcgtccacgtagcccaca

SEQ ID NO: 1857 - RNA, 21 nt, synthetic construct
  source 1..21: mol_type = other RNA
gtgtctcccggtcccaatact

SEQ ID NO: 1858 - RNA, 21 nt, synthetic construct
  source 1..21: mol_type = other RNA
gtgtggaaatacttcaaggag

SEQ ID NO: 1859 - RNA, 21 nt, synthetic construct
  source 1..21: mol_type = other RNA
gttcgtgcgcttcgacaacga

SEQ ID NO: 1860 - RNA, 21 nt, synthetic construct
  source 1..21: mol_type = other RNA
gttgtcgaagcgcacgaactg

SEQ ID NO: 1861 - RNA, 21 nt, synthetic construct
  source 1..21: mol_type = other RNA
tacaatcagagcgaggccggt

SEQ ID NO: 1862 - RNA, 21 nt, synthetic construct
  source 1..21: mol_type = other RNA
tacgtggacgacacccagttc

SEQ ID NO: 1863 - RNA, 21 nt, synthetic construct
  source 1..21: mol_type = other RNA
tactacaatcagagcgaggcc

SEQ ID NO: 1864 - RNA, 21 nt, synthetic construct
  source 1..21: mol_type = other RNA
tactctgacccctcctgctcc

SEQ ID NO: 1865 - RNA, 21 nt, synthetic construct
  source 1..21: mol_type = other RNA
tacttcaaggagtgggagcct

SEQ ID NO: 1866 - RNA, 21 nt, synthetic construct
  source 1..21: mol_type = other RNA
tagcccacagagatgaagcgg

SEQ ID NO: 1867 - RNA, 21 nt, synthetic construct
  source 1..21: mol_type = other RNA
tagccgcgcagcgtccgcaga

SEQ ID NO: 1868 - RNA, 21 nt, synthetic construct
  source 1..21: mol_type = other RNA
tagtagccgcgcagcgtccgc

SEQ ID NO: 1869 - RNA, 21 nt, synthetic construct
  source 1..21: mol_type = other RNA
tattgggaccgggagacacgg

SEQ ID NO: 1870 - RNA, 21 nt, synthetic construct
  source 1..21: mol_type = other RNA
tatttccacacttccgtgtcc

SEQ ID NO: 1871 - RNA, 21 nt, synthetic construct
  source 1..21: mol_type = other RNA
tcaccggcctcgctctgattg

SEQ ID NO: 1872 - RNA, 21 nt, synthetic construct
  source 1..21: mol_type = other RNA
tcactcaccggcctcgctctg

SEQ ID NO: 1873 - RNA, 21 nt, synthetic construct
  source 1..21: mol_type = other RNA
tcactcggaaaatctgtgcgg

SEQ ID NO: 1874 - RNA, 21 nt, synthetic construct
  source 1..21: mol_type = other RNA
tcagagcgaggccggtgagtg

SEQ ID NO: 1875 - RNA, 21 nt, synthetic construct
  source 1..21: mol_type = other RNA
tcagagtattgggaccgggag

SEQ ID NO: 1876 - RNA, 21 nt, synthetic construct
  source 1..21: mol_type = other RNA
tcatctctgtgggctacgtgg

SEQ ID NO: 1877 - RNA, 21 nt, synthetic construct
  source 1..21: mol_type = other RNA
tccacacttccgtgtcccggc

SEQ ID NO: 1878 - RNA, 21 nt, synthetic construct
  source 1..21: mol_type = other RNA
tccacgtagcccacagagatg

SEQ ID NO: 1879 - RNA, 21 nt, synthetic construct
  source 1..21: mol_type = other RNA
tcccaatactctgacccctcc

SEQ ID NO: 1880 - RNA, 21 nt, synthetic construct
  source 1..21: mol_type = other RNA
tcccactccttgaagtatttc

SEQ ID NO: 1881 - RNA, 21 nt, synthetic construct
  source 1..21: mol_type = other RNA
tcccctggccggggtcactca

SEQ ID NO: 1882 - RNA, 21 nt, synthetic construct
  source 1..21: mol_type = other RNA
tcccggtcccaatactctgac

SEQ ID NO: 1883 - RNA, 21 nt, synthetic construct
  source 1..21: mol_type = other RNA
tccctggcgctccgtgtctcc

SEQ ID NO: 1884 - RNA, 21 nt, synthetic construct
  source 1..21: mol_type = other RNA
tccgaggatggtgccgcgggc

SEQ ID NO: 1885 - RNA, 21 nt, synthetic construct
  source 1..21: mol_type = other RNA
tccgagtgaatctgcggacgc

SEQ ID NO: 1886 - RNA, 21 nt, synthetic construct
  source 1..21: mol_type = other RNA
tccgcagattcactcggaaaa

SEQ ID NO: 1887 - RNA, 21 nt, synthetic construct
  source 1..21: mol_type = other RNA
tccgtgtctcccggtcccaat

SEQ ID NO: 1888 - RNA, 21 nt, synthetic construct
  source 1..21: mol_type = other RNA
tcctcgcccccaggctcccac

SEQ ID NO: 1889 - RNA, 21 nt, synthetic construct
  source 1..21: mol_type = other RNA
tcctcggactcgcggcgtcgt

SEQ ID NO: 1890 - RNA, 21 nt, synthetic construct
  source 1..21: mol_type = other RNA
tcctgctccatccacggcgcc

SEQ ID NO: 1891 - RNA, 21 nt, synthetic construct
  source 1..21: mol_type = other RNA
tccttgaagtatttccacact

SEQ ID NO: 1892 - RNA, 21 nt, synthetic construct
  source 1..21: mol_type = other RNA
tcgaagcgcacgaactgggtg

SEQ ID NO: 1893 - RNA, 21 nt, synthetic construct
  source 1..21: mol_type = other RNA
tcgacaacgacgccgcgagtc

SEQ ID NO: 1894 - RNA, 21 nt, synthetic construct
  source 1..21: mol_type = other RNA
tcgcccccaggctcccactcc

SEQ ID NO: 1895 - RNA, 21 nt, synthetic construct
  source 1..21: mol_type = other RNA
tcgcggcgtcgttgtcgaagc

SEQ ID NO: 1896 - RNA, 21 nt, synthetic construct
  source 1..21: mol_type = other RNA
tcgctctgattgtagtagccg

SEQ ID NO: 1897 - RNA, 21 nt, synthetic construct
  source 1..21: mol_type = other RNA
tcggaaaatctgtgcggtgtc

SEQ ID NO: 1898 - RNA, 21 nt, synthetic construct
  source 1..21: mol_type = other RNA
tcggactcgcggcgtcgttgt

SEQ ID NO: 1899 - RNA, 21 nt, synthetic construct
  source 1..21: mol_type = other RNA
tcgggccgatctcagcccctc

SEQ ID NO: 1900 - RNA, 21 nt, synthetic construct
  source 1..21: mol_type = other RNA
tcgtccacgtagcccacagag

SEQ ID NO: 1901 - RNA, 21 nt, synthetic construct
  source 1..21: mol_type = other RNA
tcgtgacctgctcccctggcc

SEQ ID NO: 1902 - RNA, 21 nt, synthetic construct
  source 1..21: mol_type = other RNA
tcgtgcgcttcgacaacgacg

SEQ ID NO: 1903 - RNA, 21 nt, synthetic construct
  source 1..21: mol_type = other RNA
tcgttgtcgaagcgcacgaac

SEQ ID NO: 1904 - RNA, 21 nt, synthetic construct
  source 1..21: mol_type = other RNA
tctcccggtcccaatactctg

SEQ ID NO: 1905 - RNA, 21 nt, synthetic construct
  source 1..21: mol_type = other RNA
tctctgtgggctacgtggacg

SEQ ID NO: 1906 - RNA, 21 nt, synthetic construct
  source 1..21: mol_type = other RNA
tctgacccctcctgctccatc

SEQ ID NO: 1907 - RNA, 21 nt, synthetic construct
  source 1..21: mol_type = other RNA
tctgattgtagtagccgcgca

SEQ ID NO: 1908 - RNA, 21 nt, synthetic construct
  source 1..21: mol_type = other RNA
tctgcggacgctgcgcggcta

SEQ ID NO: 1909 - RNA, 21 nt, synthetic construct
  source 1..21: mol_type = other RNA
tctgtgcggtgtccctggcgc

SEQ ID NO: 1910 - RNA, 21 nt, synthetic construct
  source 1..21: mol_type = other RNA
tctgtgggctacgtggacgac

SEQ ID NO: 1911 - RNA, 21 nt, synthetic construct
  source 1..21: mol_type = other RNA
tgaagtatttccacacttccg

SEQ ID NO: 1912 - RNA, 21 nt, synthetic construct
  source 1..21: mol_type = other RNA
tgaatctgcggacgctgcgcg

SEQ ID NO: 1913 - RNA, 21 nt, synthetic construct
  source 1..21: mol_type = other RNA
tgaccccggccaggggagcag

SEQ ID NO: 1914 - RNA, 21 nt, synthetic construct
  source 1..21: mol_type = other RNA
tgacccctcctgctccatcca

SEQ ID NO: 1915 - RNA, 21 nt, synthetic construct
  source 1..21: mol_type = other RNA
tgacctgctcccctggccggg

SEQ ID NO: 1916 - RNA, 21 nt, synthetic construct
  source 1..21: mol_type = other RNA
tgagatcggcccgaccctcct

SEQ ID NO: 1917 - RNA, 21 nt, synthetic construct
  source 1..21: mol_type = other RNA
tgagtgaccccggccagggga

SEQ ID NO: 1918 - RNA, 21 nt, synthetic construct
  source 1..21: mol_type = other RNA
tgattgtagtagccgcgcagc

SEQ ID NO: 1919 - RNA, 21 nt, synthetic construct
  source 1..21: mol_type = other RNA
tgcgcggctactacaatcaga

SEQ ID NO: 1920 - RNA, 21 nt, synthetic construct
  source 1..21: mol_type = other RNA
tgcgcttcgacaacgacgccg

SEQ ID NO: 1921 - RNA, 21 nt, synthetic construct
  source 1..21: mol_type = other RNA
tgcggacgctgcgcggctact

SEQ ID NO: 1922 - RNA, 21 nt, synthetic construct
  source 1..21: mol_type = other RNA
tgcggtgtccctggcgctccg

SEQ ID NO: 1923 - RNA, 21 nt, synthetic construct
  source 1..21: mol_type = other RNA
tgctccatccacggcgcccgc

SEQ ID NO: 1924 - RNA, 21 nt, synthetic construct
  source 1..21: mol_type = other RNA
tgctcccctggccggggtcac

SEQ ID NO: 1925 - RNA, 21 nt, synthetic construct
  source 1..21: mol_type = other RNA
tggaaatacttcaaggagtgg

SEQ ID NO: 1926 - RNA, 21 nt, synthetic construct
  source 1..21: mol_type = other RNA
tggacgacacccagttcgtgc

SEQ ID NO: 1927 - RNA, 21 nt, synthetic construct
  source 1..21: mol_type = other RNA
tggagcaggaggggtcagagt

SEQ ID NO: 1928 - RNA, 21 nt, synthetic construct
  source 1..21: mol_type = other RNA
tggatggagcaggaggggtca

SEQ ID NO: 1929 - RNA, 21 nt, synthetic construct
  source 1..21: mol_type = other RNA
tggccggggtcactcaccggc

SEQ ID NO: 1930 - RNA, 21 nt, synthetic construct
  source 1..21: mol_type = other RNA
tggcgctccgtgtctcccggt

SEQ ID NO: 1931 - RNA, 21 nt, synthetic construct
  source 1..21: mol_type = other RNA
tgggaccgggagacacggagc

SEQ ID NO: 1932 - RNA, 21 nt, synthetic construct
  source 1..21: mol_type = other RNA
tgggggcgaggaggggctgag

SEQ ID NO: 1933 - RNA, 21 nt, synthetic construct
  source 1..21: mol_type = other RNA
tgggtgtcgtccacgtagccc

SEQ ID NO: 1934 - RNA, 21 nt, synthetic construct
  source 1..21: mol_type = other RNA
tgtagtagccgcgcagcgtcc

SEQ ID NO: 1935 - RNA, 21 nt, synthetic construct
  source 1..21: mol_type = other RNA
tgtccctggcgctccgtgtct

SEQ ID NO: 1936 - RNA, 21 nt, synthetic construct
  source 1..21: mol_type = other RNA
tgtcgaagcgcacgaactggg

SEQ ID NO: 1937 - RNA, 21 nt, synthetic construct
  source 1..21: mol_type = other RNA
tgtcgtccacgtagcccacag

SEQ ID NO: 1938 - RNA, 21 nt, synthetic construct
  source 1..21: mol_type = other RNA
tgtctcccggtcccaatactc

SEQ ID NO: 1939 - RNA, 21 nt, synthetic construct
  source 1..21: mol_type = other RNA
tgtgcggtgtccctggcgctc

SEQ ID NO: 1940 - RNA, 21 nt, synthetic construct
  source 1..21: mol_type = other RNA
tgtggaaatacttcaaggagt

SEQ ID NO: 1941 - RNA, 21 nt, synthetic construct
  source 1..21: mol_type = other RNA
tgtgggctacgtggacgacac

SEQ ID NO: 1942 - RNA, 21 nt, synthetic construct
  source 1..21: mol_type = other RNA
ttcaaggagtgggagcctggg

SEQ ID NO: 1943 - RNA, 21 nt, synthetic construct
  source 1..21: mol_type = other RNA
ttcactcggaaaatctgtgcg

SEQ ID NO: 1944 - RNA, 21 nt, synthetic construct
  source 1..21: mol_type = other RNA
ttcatctctgtgggctacgtg

SEQ ID NO: 1945 - RNA, 21 nt, synthetic construct
  source 1..21: mol_type = other RNA
ttccacacttccgtgtcccgg

SEQ ID NO: 1946 - RNA, 21 nt, synthetic construct
  source 1..21: mol_type = other RNA
ttccgagtgaatctgcggacg

SEQ ID NO: 1947 - RNA, 21 nt, synthetic construct
  source 1..21: mol_type = other RNA
ttcgacaacgacgccgcgagt

SEQ ID NO: 1948 - RNA, 21 nt, synthetic construct
  source 1..21: mol_type = other RNA
ttcgtgcgcttcgacaacgac

SEQ ID NO: 1949 - RNA, 21 nt, synthetic construct
  source 1..21: mol_type = other RNA
ttgaagtatttccacacttcc

SEQ ID NO: 1950 - RNA, 21 nt, synthetic construct
  source 1..21: mol_type = other RNA
ttgggaccgggagacacggag

SEQ ID NO: 1951 - RNA, 21 nt, synthetic construct
  source 1..21: mol_type = other RNA
ttgtagtagccgcgcagcgtc

SEQ ID NO: 1952 - RNA, 21 nt, synthetic construct
  source 1..21: mol_type = other RNA
ttgtcgaagcgcacgaactgg

SEQ ID NO: 1953 - RNA, 21 nt, synthetic construct
  source 1..21: mol_type = other RNA
tttccacacttccgtgtcccg

SEQ ID NO: 1954 - RNA, 21 nt, synthetic construct
  source 1..21: mol_type = other RNA
tttccgagtgaatctgcggac

SEQ ID NO: 1955 - RNA, 21 nt, synthetic construct
  source 1..21: mol_type = other RNA
ttttccgagtgaatctgcgga

SEQ ID NO: 1956 - RNA, 22 nt, synthetic construct
  source 1..22: mol_type = other RNA
aaaatctgtgcggtgtccctgg

SEQ ID NO: 1957 - RNA, 22 nt, synthetic construct
  source 1..22: mol_type = other RNA
aaatacttcaaggagtgggagc

SEQ ID NO: 1958 - RNA, 22 nt, synthetic construct
  source 1..22: mol_type = other RNA
aaatctgtgcggtgtccctggc

SEQ ID NO: 1959 - RNA, 22 nt, synthetic construct
  source 1..22: mol_type = other RNA
aacgacgccgcgagtccgagga

SEQ ID NO: 1960 - RNA, 22 nt, synthetic construct
  source 1..22: mol_type = other RNA
aactgggtgtcgtccacgtagc

SEQ ID NO: 1961 - RNA, 22 nt, synthetic construct
  source 1..22: mol_type = other RNA
aagcgcacgaactgggtgtcgt

SEQ ID NO: 1962 - RNA, 22 nt, synthetic construct
  source 1..22: mol_type = other RNA
aaggactcggggagccgcgccg

SEQ ID NO: 1963 - RNA, 22 nt, synthetic construct
  source 1..22: mol_type = other RNA
aagtatttccacacttccgtgt

SEQ ID NO: 1964 - RNA, 22 nt, synthetic construct
  source 1..22: mol_type = other RNA
aagtgtggaaatacttcaagga

SEQ ID NO: 1965 - RNA, 22 nt, synthetic construct
  source 1..22: mol_type = other RNA
aatactctgacccctcctgctc

SEQ ID NO: 1966 - RNA, 22 nt, synthetic construct
  source 1..22: mol_type = other RNA
aatacttcaaggagtgggagcc

SEQ ID NO: 1967 - RNA, 22 nt, synthetic construct
  source 1..22: mol_type = other RNA
aatcagagcgaggccggtgagt

SEQ ID NO: 1968 - RNA, 22 nt, synthetic construct
  source 1..22: mol_type = other RNA
aatctgcggacgctgcgcggct

SEQ ID NO: 1969 - RNA, 22 nt, synthetic construct
  source 1..22: mol_type = other RNA
aatctgtgcggtgtccctggcg

SEQ ID NO: 1970 - RNA, 22 nt, synthetic construct
  source 1..22: mol_type = other RNA
acaacgacgccgcgagtccgag

SEQ ID NO: 1971 - RNA, 22 nt, synthetic construct
  source 1..22: mol_type = other RNA
acaatcagagcgaggccggtga

SEQ ID NO: 1972 - RNA, 22 nt, synthetic construct
  source 1..22: mol_type = other RNA
acacccagttcgtgcgcttcga

SEQ ID NO: 1973 - RNA, 22 nt, synthetic construct
  source 1..22: mol_type = other RNA
acaccgcacagattttccgagt

SEQ ID NO: 1974 - RNA, 22 nt, synthetic construct
  source 1..22: mol_type = other RNA
acacggaagtgtggaaatactt

SEQ ID NO: 1975 - RNA, 22 nt, synthetic construct
  source 1..22: mol_type = other RNA
acacggagcgccagggacaccg

SEQ ID NO: 1976 - RNA, 22 nt, synthetic construct
  source 1..22: mol_type = other RNA
acacttccgtgtcccggcccgg

SEQ ID NO: 1977 - RNA, 22 nt, synthetic construct
  source 1..22: mol_type = other RNA
acagagatgaagcggggctccc

SEQ ID NO: 1978 - RNA, 22 nt, synthetic construct
  source 1..22: mol_type = other RNA
acagattttccgagtgaatctg

SEQ ID NO: 1979 - RNA, 22 nt, synthetic construct
  source 1..22: mol_type = other RNA
accatcctcggactcgcggcgt

SEQ ID NO: 1980 - RNA, 22 nt, synthetic construct
  source 1..22: mol_type = other RNA
acccagttcgtgcgcttcgaca

SEQ ID NO: 1981 - RNA, 22 nt, synthetic construct
  source 1..22: mol_type = other RNA
accccggccaggggagcaggtc

SEQ ID NO: 1982 - RNA, 22 nt, synthetic construct
  source 1..22: mol_type = other RNA
acccctcctgctccatccacgg

SEQ ID NO: 1983 - RNA, 22 nt, synthetic construct
  source 1..22: mol_type = other RNA
accgcacagattttccgagtga

SEQ ID NO: 1984 - RNA, 22 nt, synthetic construct
  source 1..22: mol_type = other RNA
accggcctcgctctgattgtag

SEQ ID NO: 1985 - RNA, 22 nt, synthetic construct
  source 1..22: mol_type = other RNA
accgggagacacggagcgccag

SEQ ID NO: 1986 - RNA, 22 nt, synthetic construct
  source 1..22: mol_type = other RNA
acctgctcccctggccggggtc

SEQ ID NO: 1987 - RNA, 22 nt, synthetic construct
  source 1..22: mol_type = other RNA
acgaactgggtgtcgtccacgt

SEQ ID NO: 1988 - RNA, 22 nt, synthetic construct
  source 1..22: mol_type = other RNA
acgacacccagttcgtgcgctt

SEQ ID NO: 1989 - RNA, 22 nt, synthetic construct
  source 1..22: mol_type = other RNA
acgacgccgcgagtccgaggat

SEQ ID NO: 1990 - RNA, 22 nt, synthetic construct
  source 1..22: mol_type = other RNA
acgccgcgagtccgaggatggt

SEQ ID NO: 1991 - RNA, 22 nt, synthetic construct
  source 1..22: mol_type = other RNA
acgctgcgcggctactacaatc

SEQ ID NO: 1992 - RNA, 22 nt, synthetic construct
  source 1..22: mol_type = other RNA
acggaagtgtggaaatacttca

SEQ ID NO: 1993 - RNA, 22 nt, synthetic construct
  source 1..22: mol_type = other RNA
acggagcgccagggacaccgca

SEQ ID NO: 1994 - RNA, 22 nt, synthetic construct
  source 1..22: mol_type = other RNA
acggcgcccgcggcaccatcct

SEQ ID NO: 1995 - RNA, 22 nt, synthetic construct
  source 1..22: mol_type = other RNA
acgtagcccacagagatgaagc

SEQ ID NO: 1996 - RNA, 22 nt, synthetic construct
  source 1..22: mol_type = other RNA
acgtggacgacacccagttcgt

SEQ ID NO: 1997 - RNA, 22 nt, synthetic construct
  source 1..22: mol_type = other RNA
actacaatcagagcgaggccgg

SEQ ID NO: 1998 - RNA, 22 nt, synthetic construct
  source 1..22: mol_type = other RNA
actcaccggcctcgctctgatt

SEQ ID NO: 1999 - RNA, 22 nt, synthetic construct
  source 1..22: mol_type = other RNA
actccttgaagtatttccacac

SEQ ID NO: 2000 - RNA, 22 nt, synthetic construct
  source 1..22: mol_type = other RNA
actcgcggcgtcgttgtcgaag

SEQ ID NO: 2001 - RNA, 22 nt, synthetic construct
  source 1..22: mol_type = other RNA
actcggaaaatctgtgcggtgt

SEQ ID NO: 2002 - RNA, 22 nt, synthetic construct
  source 1..22: mol_type = other RNA
actctgacccctcctgctccat

SEQ ID NO: 2003 - RNA, 22 nt, synthetic construct
  source 1..22: mol_type = other RNA
actgggtgtcgtccacgtagcc

SEQ ID NO: 2004 - RNA, 22 nt, synthetic construct
  source 1..22: mol_type = other RNA
acttcaaggagtgggagcctgg

SEQ ID NO: 2005 - RNA, 22 nt, synthetic construct
  source 1..22: mol_type = other RNA
acttccgtgtcccggcccggcc

SEQ ID NO: 2006 - RNA, 22 nt, synthetic construct
  source 1..22: mol_type = other RNA
agacacggagcgccagggacac

SEQ ID NO: 2007 - RNA, 22 nt, synthetic construct
  source 1..22: mol_type = other RNA
agagatgaagcggggctccccg

SEQ ID NO: 2008 - RNA, 22 nt, synthetic construct
  source 1..22: mol_type = other RNA
agagcgaggccggtgagtgacc

SEQ ID NO: 2009 - RNA, 22 nt, synthetic construct
  source 1..22: mol_type = other RNA
agagtattgggaccgggagaca

SEQ ID NO: 2010 - RNA, 22 nt, synthetic construct
  source 1..22: mol_type = other RNA
agatcggcccgaccctcctccc

SEQ ID NO: 2011 - RNA, 22 nt, synthetic construct
  source 1..22: mol_type = other RNA
agattcactcggaaaatctgtg

SEQ ID NO: 2012 - RNA, 22 nt, synthetic construct
  source 1..22: mol_type = other RNA
agattttccgagtgaatctgcg

SEQ ID NO: 2013 - RNA, 22 nt, synthetic construct
  source 1..22: mol_type = other RNA
agcaggaggggtcagagtattg

SEQ ID NO: 2014 - RNA, 22 nt, synthetic construct
  source 1..22: mol_type = other RNA
agcccacagagatgaagcgggg

SEQ ID NO: 2015 - RNA, 22 nt, synthetic construct
  source 1..22: mol_type = other RNA
agccccgcttcatctctgtggg

SEQ ID NO: 2016 - RNA, 22 nt, synthetic construct
  source 1..22: mol_type = other RNA
agccgcgcagcgtccgcagatt

SEQ ID NO: 2017 - RNA, 22 nt, synthetic construct
  source 1..22: mol_type = other RNA
agcctgggggcgaggaggggct

SEQ ID NO: 2018 - RNA, 22 nt, synthetic construct
  source 1..22: mol_type = other RNA
agcgaggccggtgagtgacccc

SEQ ID NO: 2019 - RNA, 22 nt, synthetic construct
  source 1..22: mol_type = other RNA
agcgcacgaactgggtgtcgtc

SEQ ID NO: 2020 - RNA, 22 nt, synthetic construct
  source 1..22: mol_type = other RNA
agcgccagggacaccgcacaga

SEQ ID NO: 2021 - RNA, 22 nt, synthetic construct
  source 1..22: mol_type = other RNA
agcgtccgcagattcactcgga

SEQ ID NO: 2022 - RNA, 22 nt, synthetic construct
  source 1..22: mol_type = other RNA
aggaggggctgagatcggcccg

SEQ ID NO: 2023 - RNA, 22 nt, synthetic construct
  source 1..22: mol_type = other RNA
aggaggggtcagagtattggga

SEQ ID NO: 2024 - RNA, 22 nt, synthetic construct
  source 1..22: mol_type = other RNA
aggagggtcgggccgatctcag

SEQ ID NO: 2025 - RNA, 22 nt, synthetic construct
  source 1..22: mol_type = other RNA
aggatggtgccgcgggcgccgt

SEQ ID NO: 2026 - RNA, 22 nt, synthetic construct
  source 1..22: mol_type = other RNA
aggccggtgagtgaccccggcc

SEQ ID NO: 2027 - RNA, 22 nt, synthetic construct
  source 1..22: mol_type = other RNA
aggctcccactccttgaagtat

SEQ ID NO: 2028 - RNA, 22 nt, synthetic construct
  source 1..22: mol_type = other RNA
agggacaccgcacagattttcc

SEQ ID NO: 2029 - RNA, 22 nt, synthetic construct
  source 1..22: mol_type = other RNA
aggggctgagatcggcccgacc

SEQ ID NO: 2030 - RNA, 22 nt, synthetic construct
  source 1..22: mol_type = other RNA
aggggtcagagtattgggaccg

SEQ ID NO: 2031 - RNA, 22 nt, synthetic construct
  source 1..22: mol_type = other RNA
aggggtcgtgacctgctcccct

SEQ ID NO: 2032 - RNA, 22 nt, synthetic construct
  source 1..22: mol_type = other RNA
agggtcgggccgatctcagccc

SEQ ID NO: 2033 - RNA, 22 nt, synthetic construct
  source 1..22: mol_type = other RNA
agtagccgcgcagcgtccgcag

SEQ ID NO: 2034 - RNA, 22 nt, synthetic construct
  source 1..22: mol_type = other RNA
agtattgggaccgggagacacg

SEQ ID NO: 2035 - RNA, 22 nt, synthetic construct
  source 1..22: mol_type = other RNA
agtatttccacacttccgtgtc

SEQ ID NO: 2036 - RNA, 22 nt, synthetic construct
  source 1..22: mol_type = other RNA
agtccgaggatggtgccgcggg

SEQ ID NO: 2037 - RNA, 22 nt, synthetic construct
  source 1..22: mol_type = other RNA
agtgaatctgcggacgctgcgc

SEQ ID NO: 2038 - RNA, 22 nt, synthetic construct
  source 1..22: mol_type = other RNA
agtgaccccggccaggggagca

SEQ ID NO: 2039 - RNA, 22 nt, synthetic construct
  source 1..22: mol_type = other RNA
agtgtggaaatacttcaaggag

SEQ ID NO: 2040 - RNA, 22 nt, synthetic construct
  source 1..22: mol_type = other RNA
agttcgtgcgcttcgacaacga

SEQ ID NO: 2041 - RNA, 22 nt, synthetic construct
  source 1..22: mol_type = other RNA
atactctgacccctcctgctcc

SEQ ID NO: 2042 - RNA, 22 nt, synthetic construct
  source 1..22: mol_type = other RNA
atacttcaaggagtgggagcct

SEQ ID NO: 2043 - RNA, 22 nt, synthetic construct
  source 1..22: mol_type = other RNA
atcagagcgaggccggtgagtg

SEQ ID NO: 2044 - RNA, 22 nt, synthetic construct
  source 1..22: mol_type = other RNA
atccacggcgcccgcggcacca

SEQ ID NO: 2045 - RNA, 22 nt, synthetic construct
  source 1..22: mol_type = other RNA
atcctcggactcgcggcgtcgt

SEQ ID NO: 2046 - RNA, 22 nt, synthetic construct
  source 1..22: mol_type = other RNA
atcggcccgaccctcctcccgg

SEQ ID NO: 2047 - RNA, 22 nt, synthetic construct
  source 1..22: mol_type = other RNA
atctcagcccctcctcgccccc

SEQ ID NO: 2048 - RNA, 22 nt, synthetic construct
  source 1..22: mol_type = other RNA
atctctgtgggctacgtggacg

SEQ ID NO: 2049 - RNA, 22 nt, synthetic construct
  source 1..22: mol_type = other RNA
atctgcggacgctgcgcggcta

SEQ ID NO: 2050 - RNA, 22 nt, synthetic construct
  source 1..22: mol_type = other RNA
atctgtgcggtgtccctggcgc

SEQ ID NO: 2051 - RNA, 22 nt, synthetic construct
  source 1..22: mol_type = other RNA
atggagcaggaggggtcagagt

SEQ ID NO: 2052 - RNA, 22 nt, synthetic construct
  source 1..22: mol_type = other RNA
atggtgccgcgggcgccgtgga

SEQ ID NO: 2053 - RNA, 22 nt, synthetic construct
  source 1..22: mol_type = other RNA
attcactcggaaaatctgtgcg

SEQ ID NO: 2054 - RNA, 22 nt, synthetic construct
  source 1..22: mol_type = other RNA
attgggaccgggagacacggag

SEQ ID NO: 2055 - RNA, 22 nt, synthetic construct
  source 1..22: mol_type = other RNA
attgtagtagccgcgcagcgtc

SEQ ID NO: 2056 - RNA, 22 nt, synthetic construct
  source 1..22: mol_type = other RNA
atttccacacttccgtgtcccg

SEQ ID NO: 2057 - RNA, 22 nt, synthetic construct
  source 1..22: mol_type = other RNA
attttccgagtgaatctgcgga

SEQ ID NO: 2058 - RNA, 22 nt, synthetic construct
  source 1..22: mol_type = other RNA
caacgacgccgcgagtccgagg

SEQ ID NO: 2059 - RNA, 22 nt, synthetic construct
  source 1..22: mol_type = other RNA
caatactctgacccctcctgct

SEQ ID NO: 2060 - RNA, 22 nt, synthetic construct
  source 1..22: mol_type = other RNA
caatcagagcgaggccggtgag

SEQ ID NO: 2061 - RNA, 22 nt, synthetic construct
  source 1..22: mol_type = other RNA
cacacttccgtgtcccggcccg

SEQ ID NO: 2062 - RNA, 22 nt, synthetic construct
  source 1..22: mol_type = other RNA
cacagagatgaagcggggctcc

SEQ ID NO: 2063 - RNA, 22 nt, synthetic construct
  source 1..22: mol_type = other RNA
cacagattttccgagtgaatct

SEQ ID NO: 2064 - RNA, 22 nt, synthetic construct
  source 1..22: mol_type = other RNA
caccatcctcggactcgcggcg

SEQ ID NO: 2065 - RNA, 22 nt, synthetic construct
  source 1..22: mol_type = other RNA
cacccagttcgtgcgcttcgac

SEQ ID NO: 2066 - RNA, 22 nt, synthetic construct
  source 1..22: mol_type = other RNA
caccgcacagattttccgagtg

SEQ ID NO: 2067 - RNA, 22 nt, synthetic construct
  source 1..22: mol_type = other RNA
caccggcctcgctctgattgta

SEQ ID NO: 2068 - RNA, 22 nt, synthetic construct
  source 1..22: mol_type = other RNA
cacggaagtgtggaaatacttc

SEQ ID NO: 2069 - RNA, 22 nt, synthetic construct
  source 1..22: mol_type = other RNA
cacggagcgccagggacaccgc

SEQ ID NO: 2070 - RNA, 22 nt, synthetic construct
  source 1..22: mol_type = other RNA
cacgtagcccacagagatgaag

SEQ ID NO: 2071 - RNA, 22 nt, synthetic construct
  source 1..22: mol_type = other RNA
cactcaccggcctcgctctgat

SEQ ID NO: 2072 - RNA, 22 nt, synthetic construct
  source 1..22: mol_type = other RNA
cactccttgaagtatttccaca

SEQ ID NO: 2073 - RNA, 22 nt, synthetic construct
  source 1..22: mol_type = other RNA
cactcggaaaatctgtgcggtg

SEQ ID NO: 2074 - RNA, 22 nt, synthetic construct
  source 1..22: mol_type = other RNA
cacttccgtgtcccggcccggc

SEQ ID NO: 2075 - RNA, 22 nt, synthetic construct
  source 1..22: mol_type = other RNA
cagagatgaagcggggctcccc

SEQ ID NO: 2076 - RNA, 22 nt, synthetic construct
  source 1..22: mol_type = other RNA
cagagcgaggccggtgagtgac

SEQ ID NO: 2077 - RNA, 22 nt, synthetic construct
  source 1..22: mol_type = other RNA
cagagtattgggaccgggagac

SEQ ID NO: 2078 - RNA, 22 nt, synthetic construct
  source 1..22: mol_type = other RNA
cagattcactcggaaaatctgt

SEQ ID NO: 2079 - RNA, 22 nt, synthetic construct
  source 1..22: mol_type = other RNA
cagattttccgagtgaatctgc

SEQ ID NO: 2080 - RNA, 22 nt, synthetic construct
  source 1..22: mol_type = other RNA
cagcgtccgcagattcactcgg

SEQ ID NO: 2081 - RNA, 22 nt, synthetic construct
  source 1..22: mol_type = other RNA
caggaggggtcagagtattggg

SEQ ID NO: 2082 - RNA, 22 nt, synthetic construct
  source 1..22: mol_type = other RNA
caggctcccactccttgaagta

SEQ ID NO: 2083 - RNA, 22 nt, synthetic construct
  source 1..22: mol_type = other RNA
cagggacaccgcacagattttc

SEQ ID NO: 2084 - RNA, 22 nt, synthetic construct
  source 1..22: mol_type = other RNA
cagttcgtgcgcttcgacaacg

SEQ ID NO: 2085 - RNA, 22 nt, synthetic construct
  source 1..22: mol_type = other RNA
catcctcggactcgcggcgtcg

SEQ ID NO: 2086 - RNA, 22 nt, synthetic construct
  source 1..22: mol_type = other RNA
catctctgtgggctacgtggac

SEQ ID NO: 2087 - RNA, 22 nt, synthetic construct
  source 1..22: mol_type = other RNA
ccaatactctgacccctcctgc

SEQ ID NO: 2088 - RNA, 22 nt, synthetic construct
  source 1..22: mol_type = other RNA
ccacacttccgtgtcccggccc

SEQ ID NO: 2089 - RNA, 22 nt, synthetic construct
  source 1..22: mol_type = other RNA
ccacagagatgaagcggggctc

SEQ ID NO: 2090 - RNA, 22 nt, synthetic construct
  source 1..22: mol_type = other RNA
ccacgtagcccacagagatgaa

SEQ ID NO: 2091 - RNA, 22 nt, synthetic construct
  source 1..22: mol_type = other RNA
ccactccttgaagtatttccac

SEQ ID NO: 2092 - RNA, 22 nt, synthetic construct
  source 1..22: mol_type = other RNA
ccaggctcccactccttgaagt

SEQ ID NO: 2093 - RNA, 22 nt, synthetic construct
  source 1..22: mol_type = other RNA
ccagggacaccgcacagatttt

SEQ ID NO: 2094 - RNA, 22 nt, synthetic construct
  source 1..22: mol_type = other RNA
ccagttcgtgcgcttcgacaac

SEQ ID NO: 2095 - RNA, 22 nt, synthetic construct
  source 1..22: mol_type = other RNA
ccatcctcggactcgcggcgtc

SEQ ID NO: 2096 - RNA, 22 nt, synthetic construct
  source 1..22: mol_type = other RNA
cccaatactctgacccctcctg

SEQ ID NO: 2097 - RNA, 22 nt, synthetic construct
  source 1..22: mol_type = other RNA
cccacagagatgaagcggggct

SEQ ID NO: 2098 - RNA, 22 nt, synthetic construct
  source 1..22: mol_type = other RNA
cccactccttgaagtatttcca

SEQ ID NO: 2099 - RNA, 22 nt, synthetic construct
  source 1..22: mol_type = other RNA
cccaggctcccactccttgaag

SEQ ID NO: 2100 - RNA, 22 nt, synthetic construct
  source 1..22: mol_type = other RNA
cccagttcgtgcgcttcgacaa

SEQ ID NO: 2101 - RNA, 22 nt, synthetic construct
  source 1..22: mol_type = other RNA
ccccaggctcccactccttgaa

SEQ ID NO: 2102 - RNA, 22 nt, synthetic construct
  source 1..22: mol_type = other RNA
cccccaggctcccactccttga

SEQ ID NO: 2103 - RNA, 22 nt, synthetic construct
  source 1..22: mol_type = other RNA
ccccgcttcatctctgtgggct

SEQ ID NO: 2104 - RNA, 22 nt, synthetic construct
  source 1..22: mol_type = other RNA
ccccggccaggggagcaggtca

SEQ ID NO: 2105 - RNA, 22 nt, synthetic construct
  source 1..22: mol_type = other RNA
cccctggccggggtcactcacc

SEQ ID NO: 2106 - RNA, 22 nt, synthetic construct
  source 1..22: mol_type = other RNA
cccgcggcaccatcctcggact

SEQ ID NO: 2107 - RNA, 22 nt, synthetic construct
  source 1..22: mol_type = other RNA
cccgcttcatctctgtgggcta

SEQ ID NO: 2108 - RNA, 22 nt, synthetic construct
  source 1..22: mol_type = other RNA
cccggtcccaatactctgaccc

SEQ ID NO: 2109 - RNA, 22 nt, synthetic construct
  source 1..22: mol_type = other RNA
ccctggccggggtcactcaccg

SEQ ID NO: 2110 - RNA, 22 nt, synthetic construct
  source 1..22: mol_type = other RNA
ccctggcgctccgtgtctcccg

SEQ ID NO: 2111 - RNA, 22 nt, synthetic construct
  source 1..22: mol_type = other RNA
ccgagtgaatctgcggacgctg

SEQ ID NO: 2112 - RNA, 22 nt, synthetic construct
  source 1..22: mol_type = other RNA
ccgatctcagcccctcctcgcc

SEQ ID NO: 2113 - RNA, 22 nt, synthetic construct
  source 1..22: mol_type = other RNA
ccgcacagattttccgagtgaa

SEQ ID NO: 2114 - RNA, 22 nt, synthetic construct
  source 1..22: mol_type = other RNA
ccgcagattcactcggaaaatc

SEQ ID NO: 2115 - RNA, 22 nt, synthetic construct
  source 1..22: mol_type = other RNA
ccgcgagtccgaggatggtgcc

SEQ ID NO: 2116 - RNA, 22 nt, synthetic construct
  source 1..22: mol_type = other RNA
ccgcgcagcgtccgcagattca

SEQ ID NO: 2117 - RNA, 22 nt, synthetic construct
  source 1..22: mol_type = other RNA
ccgcggcaccatcctcggactc

SEQ ID NO: 2118 - RNA, 22 nt, synthetic construct
  source 1..22: mol_type = other RNA
ccgcggggagccccgcttcatc

SEQ ID NO: 2119 - RNA, 22 nt, synthetic construct
  source 1..22: mol_type = other RNA
ccgcttcatctctgtgggctac

SEQ ID NO: 2120 - RNA, 22 nt, synthetic construct
  source 1..22: mol_type = other RNA
ccggcctcgctctgattgtagt

SEQ ID NO: 2121 - RNA, 22 nt, synthetic construct
  source 1..22: mol_type = other RNA
ccgggacacggaagtgtggaaa

SEQ ID NO: 2122 - RNA, 22 nt, synthetic construct
  source 1..22: mol_type = other RNA
ccgggagacacggagcgccagg

SEQ ID NO: 2123 - RNA, 22 nt, synthetic construct
  source 1..22: mol_type = other RNA
ccgggaggagggtcgggccgat

SEQ ID NO: 2124 - RNA, 22 nt, synthetic construct
  source 1..22: mol_type = other RNA
ccgggccgggacacggaagtgt

SEQ ID NO: 2125 - RNA, 22 nt, synthetic construct
  source 1..22: mol_type = other RNA
ccggggtcactcaccggcctcg

SEQ ID NO: 2126 - RNA, 22 nt, synthetic construct
  source 1..22: mol_type = other RNA
ccggtcccaatactctgacccc

SEQ ID NO: 2127 - RNA, 22 nt, synthetic construct
  source 1..22: mol_type = other RNA
ccggtgagtgaccccggccagg

SEQ ID NO: 2128 - RNA, 22 nt, synthetic construct
  source 1..22: mol_type = other RNA
ccgtggatggagcaggaggggt

SEQ ID NO: 2129 - RNA, 22 nt, synthetic construct
  source 1..22: mol_type = other RNA
ccgtgtctcccggtcccaatac

SEQ ID NO: 2130 - RNA, 22 nt, synthetic construct
  source 1..22: mol_type = other RNA
cctcctgctccatccacggcgc

SEQ ID NO: 2131 - RNA, 22 nt, synthetic construct
  source 1..22: mol_type = other RNA
cctcgcccccaggctcccactc

SEQ ID NO: 2132 - RNA, 22 nt, synthetic construct
  source 1..22: mol_type = other RNA
cctcgctctgattgtagtagcc

SEQ ID NO: 2133 - RNA, 22 nt, synthetic construct
  source 1..22: mol_type = other RNA
cctcggactcgcggcgtcgttg

SEQ ID NO: 2134 - RNA, 22 nt, synthetic construct
  source 1..22: mol_type = other RNA
cctgctccatccacggcgcccg

SEQ ID NO: 2135 - RNA, 22 nt, synthetic construct
  source 1..22: mol_type = other RNA
cctgctcccctggccggggtca

SEQ ID NO: 2136 - RNA, 22 nt, synthetic construct
  source 1..22: mol_type = other RNA
cctggccggggtcactcaccgg

SEQ ID NO: 2137 - RNA, 22 nt, synthetic construct
  source 1..22: mol_type = other RNA
cctggcgctccgtgtctcccgg

SEQ ID NO: 2138 - RNA, 22 nt, synthetic construct
  source 1..22: mol_type = other RNA
cctgggggcgaggaggggctga

SEQ ID NO: 2139 - RNA, 22 nt, synthetic construct
  source 1..22: mol_type = other RNA
ccttgaagtatttccacacttc

SEQ ID NO: 2140 - RNA, 22 nt, synthetic construct
  source 1..22: mol_type = other RNA
cgaactgggtgtcgtccacgta

SEQ ID NO: 2141 - RNA, 22 nt, synthetic construct
  source 1..22: mol_type = other RNA
cgaagcgcacgaactgggtgtc

SEQ ID NO: 2142 - RNA, 22 nt, synthetic construct
  source 1..22: mol_type = other RNA
cgaaggactcggggagccgcgc

SEQ ID NO: 2143 - RNA, 22 nt, synthetic construct
  source 1..22: mol_type = other RNA
cgacaacgacgccgcgagtccg

SEQ ID NO: 2144 - RNA, 22 nt, synthetic construct
  source 1..22: mol_type = other RNA
cgacacccagttcgtgcgcttc

SEQ ID NO: 2145 - RNA, 22 nt, synthetic construct
  source 1..22: mol_type = other RNA
cgacgccgcgagtccgaggatg

SEQ ID NO: 2146 - RNA, 22 nt, synthetic construct
  source 1..22: mol_type = other RNA
cgaggaggggctgagatcggcc

SEQ ID NO: 2147 - RNA, 22 nt, synthetic construct
  source 1..22: mol_type = other RNA
cgaggccggtgagtgaccccgg

SEQ ID NO: 2148 - RNA, 22 nt, synthetic construct
  source 1..22: mol_type = other RNA
cgagtccgaggatggtgccgcg

SEQ ID NO: 2149 - RNA, 22 nt, synthetic construct
  source 1..22: mol_type = other RNA
cgagtgaatctgcggacgctgc

SEQ ID NO: 2150 - RNA, 22 nt, synthetic construct
  source 1..22: mol_type = other RNA
cgatctcagcccctcctcgccc

SEQ ID NO: 2151 - RNA, 22 nt, synthetic construct
  source 1..22: mol_type = other RNA
cgcacagattttccgagtgaat

SEQ ID NO: 2152 - RNA, 22 nt, synthetic construct
  source 1..22: mol_type = other RNA
cgcacgaactgggtgtcgtcca

SEQ ID NO: 2153 - RNA, 22 nt, synthetic construct
  source 1..22: mol_type = other RNA
cgcagattcactcggaaaatct

SEQ ID NO: 2154 - RNA, 22 nt, synthetic construct
  source 1..22: mol_type = other RNA
cgcagcgtccgcagattcactc

SEQ ID NO: 2155 - RNA, 22 nt, synthetic construct
  source 1..22: mol_type = other RNA
cgccagggacaccgcacagatt

SEQ ID NO: 2156 - RNA, 22 nt, synthetic construct
  source 1..22: mol_type = other RNA
cgcccccaggctcccactcctt

SEQ ID NO: 2157 - RNA, 22 nt, synthetic construct
  source 1..22: mol_type = other RNA
cgcccgcggcaccatcctcgga

SEQ ID NO: 2158 - RNA, 22 nt, synthetic construct
  source 1..22: mol_type = other RNA
cgccgcgagtccgaggatggtg

SEQ ID NO: 2159 - RNA, 22 nt, synthetic construct
  source 1..22: mol_type = other RNA
cgccgtggatggagcaggaggg

SEQ ID NO: 2160 - RNA, 22 nt, synthetic construct
  source 1..22: mol_type = other RNA
cgcgagtccgaggatggtgccg

SEQ ID NO: 2161 - RNA, 22 nt, synthetic construct
  source 1..22: mol_type = other RNA
cgcgcagcgtccgcagattcac

SEQ ID NO: 2162 - RNA, 22 nt, synthetic construct
  source 1..22: mol_type = other RNA
cgcggcaccatcctcggactcg

SEQ ID NO: 2163 - RNA, 22 nt, synthetic construct
  source 1..22: mol_type = other RNA
cgcggcgtcgttgtcgaagcgc

SEQ ID NO: 2164 - RNA, 22 nt, synthetic construct
  source 1..22: mol_type = other RNA
cgcggctactacaatcagagcg

SEQ ID NO: 2165 - RNA, 22 nt, synthetic construct
  source 1..22: mol_type = other RNA
cgcgggcgccgtggatggagca

SEQ ID NO: 2166 - RNA, 22 nt, synthetic construct
  source 1..22: mol_type = other RNA
cgcggggagccccgcttcatct

SEQ ID NO: 2167 - RNA, 22 nt, synthetic construct
  source 1..22: mol_type = other RNA
cgctccgtgtctcccggtccca

SEQ ID NO: 2168 - RNA, 22 nt, synthetic construct
  source 1..22: mol_type = other RNA
cgctctgattgtagtagccgcg

SEQ ID NO: 2169 - RNA, 22 nt, synthetic construct
  source 1..22: mol_type = other RNA
cgctgcgcggctactacaatca

SEQ ID NO: 2170 - RNA, 22 nt, synthetic construct
  source 1..22: mol_type = other RNA
cgcttcatctctgtgggctacg

SEQ ID NO: 2171 - RNA, 22 nt, synthetic construct
  source 1..22: mol_type = other RNA
cgcttcgacaacgacgccgcga

SEQ ID NO: 2172 - RNA, 22 nt, synthetic construct
  source 1..22: mol_type = other RNA
cggaaaatctgtgcggtgtccc

SEQ ID NO: 2173 - RNA, 22 nt, synthetic construct
  source 1..22: mol_type = other RNA
cggaagtgtggaaatacttcaa

SEQ ID NO: 2174 - RNA, 22 nt, synthetic construct
  source 1..22: mol_type = other RNA
cggacgctgcgcggctactaca

SEQ ID NO: 2175 - RNA, 22 nt, synthetic construct
  source 1..22: mol_type = other RNA
cggactcgcggcgtcgttgtcg

SEQ ID NO: 2176 - RNA, 22 nt, synthetic construct
  source 1..22: mol_type = other RNA
cggagcgccagggacaccgcac

SEQ ID NO: 2177 - RNA, 22 nt, synthetic construct
  source 1..22: mol_type = other RNA
cggcaccatcctcggactcgcg

SEQ ID NO: 2178 - RNA, 22 nt, synthetic construct
  source 1..22: mol_type = other RNA
cggcctcgctctgattgtagta

SEQ ID NO: 2179 - RNA, 22 nt, synthetic construct
  source 1..22: mol_type = other RNA
cggcgtcgttgtcgaagcgcac

SEQ ID NO: 2180 - RNA, 22 nt, synthetic construct
  source 1..22: mol_type = other RNA
cggctactacaatcagagcgag

SEQ ID NO: 2181 - RNA, 22 nt, synthetic construct
  source 1..22: mol_type = other RNA
cgggacacggaagtgtggaaat

SEQ ID NO: 2182 - RNA, 22 nt, synthetic construct
  source 1..22: mol_type = other RNA
cgggagacacggagcgccaggg

SEQ ID NO: 2183 - RNA, 22 nt, synthetic construct
  source 1..22: mol_type = other RNA
cgggaggagggtcgggccgatc

SEQ ID NO: 2184 - RNA, 22 nt, synthetic construct
  source 1..22: mol_type = other RNA
cgggccgatctcagcccctcct

SEQ ID NO: 2185 - RNA, 22 nt, synthetic construct
  source 1..22: mol_type = other RNA
cgggccgggacacggaagtgtg

SEQ ID NO: 2186 - RNA, 22 nt, synthetic construct
  source 1..22: mol_type = other RNA
cgggcgccgtggatggagcagg

SEQ ID NO: 2187 - RNA, 22 nt, synthetic construct
  source 1..22: mol_type = other RNA
cggggagccccgcttcatctct

SEQ ID NO: 2188 - RNA, 22 nt, synthetic construct
  source 1..22: mol_type = other RNA
cggggtcactcaccggcctcgc

SEQ ID NO: 2189 - RNA, 22 nt, synthetic construct
  source 1..22: mol_type = other RNA
cggtcccaatactctgacccct

SEQ ID NO: 2190 - RNA, 22 nt, synthetic construct
  source 1..22: mol_type = other RNA
cggtgagtgaccccggccaggg

SEQ ID NO: 2191 - RNA, 22 nt, synthetic construct
  source 1..22: mol_type = other RNA
cggtgtccctggcgctccgtgt

SEQ ID NO: 2192 - RNA, 22 nt, synthetic construct
  source 1..22: mol_type = other RNA
cgtagcccacagagatgaagcg

SEQ ID NO: 2193 - RNA, 22 nt, synthetic construct
  source 1..22: mol_type = other RNA
cgtccacgtagcccacagagat

SEQ ID NO: 2194 - RNA, 22 nt, synthetic construct
  source 1..22: mol_type = other RNA
cgtccgcagattcactcggaaa

SEQ ID NO: 2195 - RNA, 22 nt, synthetic construct
  source 1..22: mol_type = other RNA
cgtcgttgtcgaagcgcacgaa

SEQ ID NO: 2196 - RNA, 22 nt, synthetic construct
  source 1..22: mol_type = other RNA
cgtgacctgctcccctggccgg

SEQ ID NO: 2197 - RNA, 22 nt, synthetic construct
  source 1..22: mol_type = other RNA
cgtgcgcttcgacaacgacgcc

SEQ ID NO: 2198 - RNA, 22 nt, synthetic construct
  source 1..22: mol_type = other RNA
cgtggacgacacccagttcgtg

SEQ ID NO: 2199 - RNA, 22 nt, synthetic construct
  source 1..22: mol_type = other RNA
cgtggatggagcaggaggggtc

SEQ ID NO: 2200 - RNA, 22 nt, synthetic construct
  source 1..22: mol_type = other RNA
cgtgtctcccggtcccaatact

SEQ ID NO: 2201 - RNA, 22 nt, synthetic construct
  source 1..22: mol_type = other RNA
cgttgtcgaagcgcacgaactg

SEQ ID NO: 2202 - RNA, 22 nt, synthetic construct
  source 1..22: mol_type = other RNA
ctacaatcagagcgaggccggt

SEQ ID NO: 2203 - RNA, 22 nt, synthetic construct
  source 1..22: mol_type = other RNA
ctacgtggacgacacccagttc

SEQ ID NO: 2204 - RNA, 22 nt, synthetic construct
  source 1..22: mol_type = other RNA
ctactacaatcagagcgaggcc

SEQ ID NO: 2205 - RNA, 22 nt, synthetic construct
  source 1..22: mol_type = other RNA
ctcaccggcctcgctctgattg

SEQ ID NO: 2206 - RNA, 22 nt, synthetic construct
  source 1..22: mol_type = other RNA
ctcccactccttgaagtatttc

SEQ ID NO: 2207 - RNA, 22 nt, synthetic construct
  source 1..22: mol_type = other RNA
ctcccctggccggggtcactca

SEQ ID NO: 2208 - RNA, 22 nt, synthetic construct
  source 1..22: mol_type = other RNA
ctcccggtcccaatactctgac

SEQ ID NO: 2209 - RNA, 22 nt, synthetic construct
  source 1..22: mol_type = other RNA
ctccgtgtctcccggtcccaat

SEQ ID NO: 2210 - RNA, 22 nt, synthetic construct
  source 1..22: mol_type = other RNA
ctcctcgcccccaggctcccac

SEQ ID NO: 2211 - RNA, 22 nt, synthetic construct
  source 1..22: mol_type = other RNA
ctcctgctccatccacggcgcc

SEQ ID NO: 2212 - RNA, 22 nt, synthetic construct
  source 1..22: mol_type = other RNA
ctccttgaagtatttccacact

SEQ ID NO: 2213 - RNA, 22 nt, synthetic construct
  source 1..22: mol_type = other RNA
ctcgcccccaggctcccactcc

SEQ ID NO: 2214 - RNA, 22 nt, synthetic construct
  source 1..22: mol_type = other RNA
ctcgcggcgtcgttgtcgaagc

SEQ ID NO: 2215 - RNA, 22 nt, synthetic construct
  source 1..22: mol_type = other RNA
ctcgctctgattgtagtagccg

SEQ ID NO: 2216 - RNA, 22 nt, synthetic construct
  source 1..22: mol_type = other RNA
ctcggaaaatctgtgcggtgtc

SEQ ID NO: 2217 - RNA, 22 nt, synthetic construct
  source 1..22: mol_type = other RNA
ctcggactcgcggcgtcgttgt

SEQ ID NO: 2218 - RNA, 22 nt, synthetic construct
  source 1..22: mol_type = other RNA
ctctgacccctcctgctccatc

SEQ ID NO: 2219 - RNA, 22 nt, synthetic construct
  source 1..22: mol_type = other RNA
ctctgattgtagtagccgcgca

SEQ ID NO: 2220 - RNA, 22 nt, synthetic construct
  source 1..22: mol_type = other RNA
ctctgtgggctacgtggacgac

SEQ ID NO: 2221 - RNA, 22 nt, synthetic construct
  source 1..22: mol_type = other RNA
ctgacccctcctgctccatcca

SEQ ID NO: 2222 - RNA, 22 nt, synthetic construct
  source 1..22: mol_type = other RNA
ctgagatcggcccgaccctcct

SEQ ID NO: 2223 - RNA, 22 nt, synthetic construct
  source 1..22: mol_type = other RNA
ctgattgtagtagccgcgcagc

SEQ ID NO: 2224 - RNA, 22 nt, synthetic construct
  source 1..22: mol_type = other RNA
ctgcgcggctactacaatcaga

SEQ ID NO: 2225 - RNA, 22 nt, synthetic construct
  source 1..22: mol_type = other RNA
ctgcggacgctgcgcggctact

SEQ ID NO: 2226 - RNA, 22 nt, synthetic construct
  source 1..22: mol_type = other RNA
ctgctccatccacggcgcccgc

SEQ ID NO: 2227 - RNA, 22 nt, synthetic construct
  source 1..22: mol_type = other RNA
ctgctcccctggccggggtcac

SEQ ID NO: 2228 - RNA, 22 nt, synthetic construct
  source 1..22: mol_type = other RNA
ctggccggggtcactcaccggc

SEQ ID NO: 2229 - RNA, 22 nt, synthetic construct
  source 1..22: mol_type = other RNA
ctggcgctccgtgtctcccggt

SEQ ID NO: 2230 - RNA, 22 nt, synthetic construct
  source 1..22: mol_type = other RNA
ctgggggcgaggaggggctgag

SEQ ID NO: 2231 - RNA, 22 nt, synthetic construct
  source 1..22: mol_type = other RNA
ctgggtgtcgtccacgtagccc

SEQ ID NO: 2232 - RNA, 22 nt, synthetic construct
  source 1..22: mol_type = other RNA
ctgtgcggtgtccctggcgctc

SEQ ID NO: 2233 - RNA, 22 nt, synthetic construct
  source 1..22: mol_type = other RNA
ctgtgggctacgtggacgacac

SEQ ID NO: 2234 - RNA, 22 nt, synthetic construct
  source 1..22: mol_type = other RNA
cttcaaggagtgggagcctggg

SEQ ID NO: 2235 - RNA, 22 nt, synthetic construct
  source 1..22: mol_type = other RNA
cttcatctctgtgggctacgtg

SEQ ID NO: 2236 - RNA, 22 nt, synthetic construct
  source 1..22: mol_type = other RNA
cttcgacaacgacgccgcgagt

SEQ ID NO: 2237 - RNA, 22 nt, synthetic construct
  source 1..22: mol_type = other RNA
cttgaagtatttccacacttcc

SEQ ID NO: 2238 - RNA, 22 nt, synthetic construct
  source 1..22: mol_type = other RNA
gaaaatctgtgcggtgtccctg

SEQ ID NO: 2239 - RNA, 22 nt, synthetic construct
  source 1..22: mol_type = other RNA
gaaatacttcaaggagtgggag

SEQ ID NO: 2240 - RNA, 22 nt, synthetic construct
  source 1..22: mol_type = other RNA
gaactgggtgtcgtccacgtag

SEQ ID NO: 2241 - RNA, 22 nt, synthetic construct
  source 1..22: mol_type = other RNA
gaagcgcacgaactgggtgtcg

SEQ ID NO: 2242 - RNA, 22 nt, synthetic construct
  source 1..22: mol_type = other RNA
gaaggactcggggagccgcgcc

SEQ ID NO: 2243 - RNA, 22 nt, synthetic construct
  source 1..22: mol_type = other RNA
gaagtatttccacacttccgtg

SEQ ID NO: 2244 - RNA, 22 nt, synthetic construct
  source 1..22: mol_type = other RNA
gaagtgtggaaatacttcaagg

SEQ ID NO: 2245 - RNA, 22 nt, synthetic construct
  source 1..22: mol_type = other RNA
gaatctgcggacgctgcgcggc

SEQ ID NO: 2246 - RNA, 22 nt, synthetic construct
  source 1..22: mol_type = other RNA
gacaacgacgccgcgagtccga

SEQ ID NO: 2247 - RNA, 22 nt, synthetic construct
  source 1..22: mol_type = other RNA
gacacccagttcgtgcgcttcg

SEQ ID NO: 2248 - RNA, 22 nt, synthetic construct
  source 1..22: mol_type = other RNA
gacaccgcacagattttccgag

SEQ ID NO: 2249 - RNA, 22 nt, synthetic construct
  source 1..22: mol_type = other RNA
gacacggaagtgtggaaatact

SEQ ID NO: 2250 - RNA, 22 nt, synthetic construct
  source 1..22: mol_type = other RNA
gacacggagcgccagggacacc

SEQ ID NO: 2251 - RNA, 22 nt, synthetic construct
  source 1..22: mol_type = other RNA
gaccccggccaggggagcaggt

SEQ ID NO: 2252 - RNA, 22 nt, synthetic construct
  source 1..22: mol_type = other RNA
gacccctcctgctccatccacg

SEQ ID NO: 2253 - RNA, 22 nt, synthetic construct
  source 1..22: mol_type = other RNA
gaccgggagacacggagcgcca

SEQ ID NO: 2254 - RNA, 22 nt, synthetic construct
  source 1..22: mol_type = other RNA
gacctgctcccctggccggggt

SEQ ID NO: 2255 - RNA, 22 nt, synthetic construct
  source 1..22: mol_type = other RNA
gacgacacccagttcgtgcgct

SEQ ID NO: 2256 - RNA, 22 nt, synthetic construct
  source 1..22: mol_type = other RNA
gacgccgcgagtccgaggatgg

SEQ ID NO: 2257 - RNA, 22 nt, synthetic construct
  source 1..22: mol_type = other RNA
gacgctgcgcggctactacaat

SEQ ID NO: 2258 - RNA, 22 nt, synthetic construct
  source 1..22: mol_type = other RNA
gactcgcggcgtcgttgtcgaa

SEQ ID NO: 2259 - RNA, 22 nt, synthetic construct
  source 1..22: mol_type = other RNA
gagacacggagcgccagggaca

SEQ ID NO: 2260 - RNA, 22 nt, synthetic construct
  source 1..22: mol_type = other RNA
gagatcggcccgaccctcctcc

SEQ ID NO: 2261 - RNA, 22 nt, synthetic construct
  source 1..22: mol_type = other RNA
gagcaggaggggtcagagtatt

SEQ ID NO: 2262 - RNA, 22 nt, synthetic construct
  source 1..22: mol_type = other RNA
gagccccgcttcatctctgtgg

SEQ ID NO: 2263 - RNA, 22 nt, synthetic construct
  source 1..22: mol_type = other RNA
gagcgaggccggtgagtgaccc

SEQ ID NO: 2264 - RNA, 22 nt, synthetic construct
  source 1..22: mol_type = other RNA
gagcgccagggacaccgcacag

SEQ ID NO: 2265 - RNA, 22 nt, synthetic construct
  source 1..22: mol_type = other RNA
gaggaggggctgagatcggccc

SEQ ID NO: 2266 - RNA, 22 nt, synthetic construct
  source 1..22: mol_type = other RNA
gaggagggtcgggccgatctca

SEQ ID NO: 2267 - RNA, 22 nt, synthetic construct
  source 1..22: mol_type = other RNA
gaggccggtgagtgaccccggc

SEQ ID NO: 2268 - RNA, 22 nt, synthetic construct
  source 1..22: mol_type = other RNA
gaggggctgagatcggcccgac

SEQ ID NO: 2269 - RNA, 22 nt, synthetic construct
  source 1..22: mol_type = other RNA
gaggggtcagagtattgggacc

SEQ ID NO: 2270 - RNA, 22 nt, synthetic construct
  source 1..22: mol_type = other RNA
gagggtcgggccgatctcagcc

SEQ ID NO: 2271 - RNA, 22 nt, synthetic construct
  source 1..22: mol_type = other RNA
gagtattgggaccgggagacac

SEQ ID NO: 2272 - RNA, 22 nt, synthetic construct
  source 1..22: mol_type = other RNA
gagtccgaggatggtgccgcgg

SEQ ID NO: 2273 - RNA, 22 nt, synthetic construct
  source 1..22: mol_type = other RNA
gagtgaatctgcggacgctgcg

SEQ ID NO: 2274 - RNA, 22 nt, synthetic construct
  source 1..22: mol_type = other RNA
gagtgaccccggccaggggagc

SEQ ID NO: 2275 - RNA, 22 nt, synthetic construct
  source 1..22: mol_type = other RNA
gatcggcccgaccctcctcccg

SEQ ID NO: 2276 - RNA, 22 nt, synthetic construct
  source 1..22: mol_type = other RNA
gatctcagcccctcctcgcccc

SEQ ID NO: 2277 - RNA, 22 nt, synthetic construct
  source 1..22: mol_type = other RNA
gatggagcaggaggggtcagag

SEQ ID NO: 2278 - RNA, 22 nt, synthetic construct
  source 1..22: mol_type = other RNA
gattcactcggaaaatctgtgc

SEQ ID NO: 2279 - RNA, 22 nt, synthetic construct
  source 1..22: mol_type = other RNA
gattgtagtagccgcgcagcgt

SEQ ID NO: 2280 - RNA, 22 nt, synthetic construct
  source 1..22: mol_type = other RNA
gattttccgagtgaatctgcgg

SEQ ID NO: 2281 - RNA, 22 nt, synthetic construct
  source 1..22: mol_type = other RNA
gcacagattttccgagtgaatc

SEQ ID NO: 2282 - RNA, 22 nt, synthetic construct
  source 1..22: mol_type = other RNA
gcaccatcctcggactcgcggc

SEQ ID NO: 2283 - RNA, 22 nt, synthetic construct
  source 1..22: mol_type = other RNA
gcacgaactgggtgtcgtccac

SEQ ID NO: 2284 - RNA, 22 nt, synthetic construct
  source 1..22: mol_type = other RNA
gcagattcactcggaaaatctg

SEQ ID NO: 2285 - RNA, 22 nt, synthetic construct
  source 1..22: mol_type = other RNA
gcagcgtccgcagattcactcg

SEQ ID NO: 2286 - RNA, 22 nt, synthetic construct
  source 1..22: mol_type = other RNA
gcaggaggggtcagagtattgg

SEQ ID NO: 2287 - RNA, 22 nt, synthetic construct
  source 1..22: mol_type = other RNA
gccagggacaccgcacagattt

SEQ ID NO: 2288 - RNA, 22 nt, synthetic construct
  source 1..22: mol_type = other RNA
gcccacagagatgaagcggggc

SEQ ID NO: 2289 - RNA, 22 nt, synthetic construct
  source 1..22: mol_type = other RNA
gcccccaggctcccactccttg

SEQ ID NO: 2290 - RNA, 22 nt, synthetic construct
  source 1..22: mol_type = other RNA
gccccgcttcatctctgtgggc

SEQ ID NO: 2291 - RNA, 22 nt, synthetic construct
  source 1..22: mol_type = other RNA
gcccgcggcaccatcctcggac

SEQ ID NO: 2292 - RNA, 22 nt, synthetic construct
  source 1..22: mol_type = other RNA
gccgatctcagcccctcctcgc

SEQ ID NO: 2293 - RNA, 22 nt, synthetic construct
  source 1..22: mol_type = other RNA
gccgcgagtccgaggatggtgc

SEQ ID NO: 2294 - RNA, 22 nt, synthetic construct
  source 1..22: mol_type = other RNA
gccgcgcagcgtccgcagattc

SEQ ID NO: 2295 - RNA, 22 nt, synthetic construct
  source 1..22: mol_type = other RNA
gccgcggggagccccgcttcat

SEQ ID NO: 2296 - RNA, 22 nt, synthetic construct
  source 1..22: mol_type = other RNA
gccgggacacggaagtgtggaa

SEQ ID NO: 2297 - RNA, 22 nt, synthetic construct
  source 1..22: mol_type = other RNA
gccgggccgggacacggaagtg

SEQ ID NO: 2298 - RNA, 22 nt, synthetic construct
  source 1..22: mol_type = other RNA
gccggggtcactcaccggcctc

SEQ ID NO: 2299 - RNA, 22 nt, synthetic construct
  source 1..22: mol_type = other RNA
gccggtgagtgaccccggccag

SEQ ID NO: 2300 - RNA, 22 nt, synthetic construct
  source 1..22: mol_type = other RNA
gccgtggatggagcaggagggg

SEQ ID NO: 2301 - RNA, 22 nt, synthetic construct
  source 1..22: mol_type = other RNA
gcctcgctctgattgtagtagc

SEQ ID NO: 2302 - RNA, 22 nt, synthetic construct
  source 1..22: mol_type = other RNA
gcgaaggactcggggagccgcg

SEQ ID NO: 2303 - RNA, 22 nt, synthetic construct
  source 1..22: mol_type = other RNA
gcgaggaggggctgagatcggc

SEQ ID NO: 2304 - RNA, 22 nt, synthetic construct
  source 1..22: mol_type = other RNA
gcgaggccggtgagtgaccccg

SEQ ID NO: 2305 - RNA, 22 nt, synthetic construct
  source 1..22: mol_type = other RNA
gcgagtccgaggatggtgccgc

SEQ ID NO: 2306 - RNA, 22 nt, synthetic construct
  source 1..22: mol_type = other RNA
gcgcacgaactgggtgtcgtcc

SEQ ID NO: 2307 - RNA, 22 nt, synthetic construct
  source 1..22: mol_type = other RNA
gcgcagcgtccgcagattcact

SEQ ID NO: 2308 - RNA, 22 nt, synthetic construct
  source 1..22: mol_type = other RNA
gcgccagggacaccgcacagat

SEQ ID NO: 2309 - RNA, 22 nt, synthetic construct
  source 1..22: mol_type = other RNA
gcgccgtggatggagcaggagg

SEQ ID NO: 2310 - RNA, 22 nt, synthetic construct
  source 1..22: mol_type = other RNA
gcgcggctactacaatcagagc

SEQ ID NO: 2311 - RNA, 22 nt, synthetic construct
  source 1..22: mol_type = other RNA
gcgctccgtgtctcccggtccc

SEQ ID NO: 2312 - RNA, 22 nt, synthetic construct
  source 1..22: mol_type = other RNA
gcgcttcgacaacgacgccgcg

SEQ ID NO: 2313 - RNA, 22 nt, synthetic construct
  source 1..22: mol_type = other RNA
gcggacgctgcgcggctactac

SEQ ID NO: 2314 - RNA, 22 nt, synthetic construct
  source 1..22: mol_type = other RNA
gcggcaccatcctcggactcgc

SEQ ID NO: 2315 - RNA, 22 nt, synthetic construct
  source 1..22: mol_type = other RNA
gcggcgtcgttgtcgaagcgca

SEQ ID NO: 2316 - RNA, 22 nt, synthetic construct
  source 1..22: mol_type = other RNA
gcggctactacaatcagagcga

SEQ ID NO: 2317 - RNA, 22 nt, synthetic construct
  source 1..22: mol_type = other RNA
gcgggcgccgtggatggagcag

SEQ ID NO: 2318 - RNA, 22 nt, synthetic construct
  source 1..22: mol_type = other RNA
gcggggagccccgcttcatctc

SEQ ID NO: 2319 - RNA, 22 nt, synthetic construct
  source 1..22: mol_type = other RNA
gcggtgtccctggcgctccgtg

SEQ ID NO: 2320 - RNA, 22 nt, synthetic construct
  source 1..22: mol_type = other RNA
gcgtccgcagattcactcggaa

SEQ ID NO: 2321 - RNA, 22 nt, synthetic construct
  source 1..22: mol_type = other RNA
gcgtcgttgtcgaagcgcacga

SEQ ID NO: 2322 - RNA, 22 nt, synthetic construct
  source 1..22: mol_type = other RNA
gctacgtggacgacacccagtt

SEQ ID NO: 2323 - RNA, 22 nt, synthetic construct
  source 1..22: mol_type = other RNA
gctactacaatcagagcgaggc

SEQ ID NO: 2324 - RNA, 22 nt, synthetic construct
  source 1..22: mol_type = other RNA
gctcccactccttgaagtattt

SEQ ID NO: 2325 - RNA, 22 nt, synthetic construct
  source 1..22: mol_type = other RNA
gctcccctggccggggtcactc

SEQ ID NO: 2326 - RNA, 22 nt, synthetic construct
  source 1..22: mol_type = other RNA
gctccgtgtctcccggtcccaa

SEQ ID NO: 2327 - RNA, 22 nt, synthetic construct
  source 1..22: mol_type = other RNA
gctctgattgtagtagccgcgc

SEQ ID NO: 2328 - RNA, 22 nt, synthetic construct
  source 1..22: mol_type = other RNA
gctgagatcggcccgaccctcc

SEQ ID NO: 2329 - RNA, 22 nt, synthetic construct
  source 1..22: mol_type = other RNA
gctgcgcggctactacaatcag

SEQ ID NO: 2330 - RNA, 22 nt, synthetic construct
  source 1..22: mol_type = other RNA
gcttcatctctgtgggctacgt

SEQ ID NO: 2331 - RNA, 22 nt, synthetic construct
  source 1..22: mol_type = other RNA
gcttcgacaacgacgccgcgag

SEQ ID NO: 2332 - RNA, 22 nt, synthetic construct
  source 1..22: mol_type = other RNA
ggaaaatctgtgcggtgtccct

SEQ ID NO: 2333 - RNA, 22 nt, synthetic construct
  source 1..22: mol_type = other RNA
ggaaatacttcaaggagtggga

SEQ ID NO: 2334 - RNA, 22 nt, synthetic construct
  source 1..22: mol_type = other RNA
ggaagtgtggaaatacttcaag

SEQ ID NO: 2335 - RNA, 22 nt, synthetic construct
  source 1..22: mol_type = other RNA
ggacaccgcacagattttccga

SEQ ID NO: 2336 - RNA, 22 nt, synthetic construct
  source 1..22: mol_type = other RNA
ggacacggaagtgtggaaatac

SEQ ID NO: 2337 - RNA, 22 nt, synthetic construct
  source 1..22: mol_type = other RNA
ggaccgggagacacggagcgcc

SEQ ID NO: 2338 - RNA, 22 nt, synthetic construct
  source 1..22: mol_type = other RNA
ggacgacacccagttcgtgcgc

SEQ ID NO: 2339 - RNA, 22 nt, synthetic construct
  source 1..22: mol_type = other RNA
ggacgctgcgcggctactacaa

SEQ ID NO: 2340 - RNA, 22 nt, synthetic construct
  source 1..22: mol_type = other RNA
ggactcgcggcgtcgttgtcga

SEQ ID NO: 2341 - RNA, 22 nt, synthetic construct
  source 1..22: mol_type = other RNA
ggagacacggagcgccagggac

SEQ ID NO: 2342 - RNA, 22 nt, synthetic construct
  source 1..22: mol_type = other RNA
ggagcaggaggggtcagagtat

SEQ ID NO: 2343 - RNA, 22 nt, synthetic construct
  source 1..22: mol_type = other RNA
ggagccccgcttcatctctgtg

SEQ ID NO: 2344 - RNA, 22 nt, synthetic construct
  source 1..22: mol_type = other RNA
ggagcgccagggacaccgcaca

SEQ ID NO: 2345 - RNA, 22 nt, synthetic construct
  source 1..22: mol_type = other RNA
ggaggagggtcgggccgatctc

SEQ ID NO: 2346 - RNA, 22 nt, synthetic construct
  source 1..22: mol_type = other RNA
ggaggggctgagatcggcccga

SEQ ID NO: 2347 - RNA, 22 nt, synthetic construct
  source 1..22: mol_type = other RNA
ggaggggtcagagtattgggac

SEQ ID NO: 2348 - RNA, 22 nt, synthetic construct
  source 1..22: mol_type = other RNA
ggagggtcgggccgatctcagc

SEQ ID NO: 2349 - RNA, 22 nt, synthetic construct
  source 1..22: mol_type = other RNA
ggatggagcaggaggggtcaga

SEQ ID NO: 2350 - RNA, 22 nt, synthetic construct
  source 1..22: mol_type = other RNA
ggcaccatcctcggactcgcgg

SEQ ID NO: 2351 - RNA, 22 nt, synthetic construct
  source 1..22: mol_type = other RNA
ggccgatctcagcccctcctcg

SEQ ID NO: 2352 - RNA, 22 nt, synthetic construct
  source 1..22: mol_type = other RNA
ggccgggacacggaagtgtgga

SEQ ID NO: 2353 - RNA, 22 nt, synthetic construct
  source 1..22: mol_type = other RNA
ggccgggccgggacacggaagt

SEQ ID NO: 2354 - RNA, 22 nt, synthetic construct
  source 1..22: mol_type = other RNA
ggccggggtcactcaccggcct

SEQ ID NO: 2355 - RNA, 22 nt, synthetic construct
  source 1..22: mol_type = other RNA
ggccggtgagtgaccccggcca

SEQ ID NO: 2356 - RNA, 22 nt, synthetic construct
  source 1..22: mol_type = other RNA
ggcctcgctctgattgtagtag

SEQ ID NO: 2357 - RNA, 22 nt, synthetic construct
  source 1..22: mol_type = other RNA
ggcgaaggactcggggagccgc

SEQ ID NO: 2358 - RNA, 22 nt, synthetic construct
  source 1..22: mol_type = other RNA
ggcgaggaggggctgagatcgg

SEQ ID NO: 2359 - RNA, 22 nt, synthetic construct
  source 1..22: mol_type = other RNA
ggcgccgtggatggagcaggag

SEQ ID NO: 2360 - RNA, 22 nt, synthetic construct
  source 1..22: mol_type = other RNA
ggcgctccgtgtctcccggtcc

SEQ ID NO: 2361 - RNA, 22 nt, synthetic construct
  source 1..22: mol_type = other RNA
ggcgtcgttgtcgaagcgcacg

SEQ ID NO: 2362 - RNA, 22 nt, synthetic construct
  source 1..22: mol_type = other RNA
ggctacgtggacgacacccagt

SEQ ID NO: 2363 - RNA, 22 nt, synthetic construct
  source 1..22: mol_type = other RNA
ggctactacaatcagagcgagg

SEQ ID NO: 2364 - RNA, 22 nt, synthetic construct
  source 1..22: mol_type = other RNA
ggctcccactccttgaagtatt

SEQ ID NO: 2365 - RNA, 22 nt, synthetic construct
  source 1..22: mol_type = other RNA
ggctgagatcggcccgaccctc

SEQ ID NO: 2366 - RNA, 22 nt, synthetic construct
  source 1..22: mol_type = other RNA
gggacaccgcacagattttccg

SEQ ID NO: 2367 - RNA, 22 nt, synthetic construct
  source 1..22: mol_type = other RNA
gggacacggaagtgtggaaata

SEQ ID NO: 2368 - RNA, 22 nt, synthetic construct
  source 1..22: mol_type = other RNA
gggaccgggagacacggagcgc

SEQ ID NO: 2369 - RNA, 22 nt, synthetic construct
  source 1..22: mol_type = other RNA
gggagacacggagcgccaggga

SEQ ID NO: 2370 - RNA, 22 nt, synthetic construct
  source 1..22: mol_type = other RNA
gggagccccgcttcatctctgt

SEQ ID NO: 2371 - RNA, 22 nt, synthetic construct
  source 1..22: mol_type = other RNA
gggaggagggtcgggccgatct

SEQ ID NO: 2372 - RNA, 22 nt, synthetic construct
  source 1..22: mol_type = other RNA
gggccgatctcagcccctcctc

SEQ ID NO: 2373 - RNA, 22 nt, synthetic construct
  source 1..22: mol_type = other RNA
gggccgggacacggaagtgtgg

SEQ ID NO: 2374 - RNA, 22 nt, synthetic construct
  source 1..22: mol_type = other RNA
gggcgaaggactcggggagccg

SEQ ID NO: 2375 - RNA, 22 nt, synthetic construct
  source 1..22: mol_type = other RNA
gggcgaggaggggctgagatcg

SEQ ID NO: 2376 - RNA, 22 nt, synthetic construct
  source 1..22: mol_type = other RNA
gggcgccgtggatggagcagga

SEQ ID NO: 2377 - RNA, 22 nt, synthetic construct
  source 1..22: mol_type = other RNA
gggctacgtggacgacacccag

SEQ ID NO: 2378 - RNA, 22 nt, synthetic construct
  source 1..22: mol_type = other RNA
gggctgagatcggcccgaccct

SEQ ID NO: 2379 - RNA, 22 nt, synthetic construct
  source 1..22: mol_type = other RNA
ggggagccccgcttcatctctg

SEQ ID NO: 2380 - RNA, 22 nt, synthetic construct
  source 1..22: mol_type = other RNA
ggggcgaaggactcggggagcc

SEQ ID NO: 2381 - RNA, 22 nt, synthetic construct
  source 1..22: mol_type = other RNA
ggggcgaggaggggctgagatc

SEQ ID NO: 2382 - RNA, 22 nt, synthetic construct
  source 1..22: mol_type = other RNA
ggggctgagatcggcccgaccc

SEQ ID NO: 2383 - RNA, 22 nt, synthetic construct
  source 1..22: mol_type = other RNA
gggggcgaaggactcggggagc

SEQ ID NO: 2384 - RNA, 22 nt, synthetic construct
  source 1..22: mol_type = other RNA
gggggcgaggaggggctgagat

SEQ ID NO: 2385 - RNA, 22 nt, synthetic construct
  source 1..22: mol_type = other RNA
ggggtcactcaccggcctcgct

SEQ ID NO: 2386 - RNA, 22 nt, synthetic construct
  source 1..22: mol_type = other RNA
ggggtcagagtattgggaccgg

SEQ ID NO: 2387 - RNA, 22 nt, synthetic construct
  source 1..22: mol_type = other RNA
ggggtcgtgacctgctcccctg

SEQ ID NO: 2388 - RNA, 22 nt, synthetic construct
  source 1..22: mol_type = other RNA
gggtcactcaccggcctcgctc

SEQ ID NO: 2389 - RNA, 22 nt, synthetic construct
  source 1..22: mol_type = other RNA
gggtcagagtattgggaccggg

SEQ ID NO: 2390 - RNA, 22 nt, synthetic construct
  source 1..22: mol_type = other RNA
gggtcgggccgatctcagcccc

SEQ ID NO: 2391 - RNA, 22 nt, synthetic construct
  source 1..22: mol_type = other RNA
gggtcgtgacctgctcccctgg

SEQ ID NO: 2392 - RNA, 22 nt, synthetic construct
  source 1..22: mol_type = other RNA
gggtgtcgtccacgtagcccac

SEQ ID NO: 2393 - RNA, 22 nt, synthetic construct
  source 1..22: mol_type = other RNA
ggtcactcaccggcctcgctct

SEQ ID NO: 2394 - RNA, 22 nt, synthetic construct
  source 1..22: mol_type = other RNA
ggtcagagtattgggaccggga

SEQ ID NO: 2395 - RNA, 22 nt, synthetic construct
  source 1..22: mol_type = other RNA
ggtcccaatactctgacccctc

SEQ ID NO: 2396 - RNA, 22 nt, synthetic construct
  source 1..22: mol_type = other RNA
ggtcgggccgatctcagcccct

SEQ ID NO: 2397 - RNA, 22 nt, synthetic construct
  source 1..22: mol_type = other RNA
ggtcgtgacctgctcccctggc

SEQ ID NO: 2398 - RNA, 22 nt, synthetic construct
  source 1..22: mol_type = other RNA
ggtgagtgaccccggccagggg

SEQ ID NO: 2399 - RNA, 22 nt, synthetic construct
  source 1..22: mol_type = other RNA
ggtgtccctggcgctccgtgtc

SEQ ID NO: 2400 - RNA, 22 nt, synthetic construct
  source 1..22: mol_type = other RNA
ggtgtcgtccacgtagcccaca

SEQ ID NO: 2401 - RNA, 22 nt, synthetic construct
  source 1..22: mol_type = other RNA
gtagcccacagagatgaagcgg

SEQ ID NO: 2402 - RNA, 22 nt, synthetic construct
  source 1..22: mol_type = other RNA
gtagccgcgcagcgtccgcaga

SEQ ID NO: 2403 - RNA, 22 nt, synthetic construct
  source 1..22: mol_type = other RNA
gtagtagccgcgcagcgtccgc

SEQ ID NO: 2404 - RNA, 22 nt, synthetic construct
  source 1..22: mol_type = other RNA
gtattgggaccgggagacacgg

SEQ ID NO: 2405 - RNA, 22 nt, synthetic construct
  source 1..22: mol_type = other RNA
gtatttccacacttccgtgtcc

SEQ ID NO: 2406 - RNA, 22 nt, synthetic construct
  source 1..22: mol_type = other RNA
gtcactcaccggcctcgctctg

SEQ ID NO: 2407 - RNA, 22 nt, synthetic construct
  source 1..22: mol_type = other RNA
gtcagagtattgggaccgggag

SEQ ID NO: 2408 - RNA, 22 nt, synthetic construct
  source 1..22: mol_type = other RNA
gtccacgtagcccacagagatg

SEQ ID NO: 2409 - RNA, 22 nt, synthetic construct
  source 1..22: mol_type = other RNA
gtcccaatactctgacccctcc

SEQ ID NO: 2410 - RNA, 22 nt, synthetic construct
  source 1..22: mol_type = other RNA
gtccctggcgctccgtgtctcc

SEQ ID NO: 2411 - RNA, 22 nt, synthetic construct
  source 1..22: mol_type = other RNA
gtccgaggatggtgccgcgggc

SEQ ID NO: 2412 - RNA, 22 nt, synthetic construct
  source 1..22: mol_type = other RNA
gtccgcagattcactcggaaaa

SEQ ID NO: 2413 - RNA, 22 nt, synthetic construct
  source 1..22: mol_type = other RNA
gtcgaagcgcacgaactgggtg

SEQ ID NO: 2414 - RNA, 22 nt, synthetic construct
  source 1..22: mol_type = other RNA
gtcgggccgatctcagcccctc

SEQ ID NO: 2415 - RNA, 22 nt, synthetic construct
  source 1..22: mol_type = other RNA
gtcgtccacgtagcccacagag

SEQ ID NO: 2416 - RNA, 22 nt, synthetic construct
  source 1..22: mol_type = other RNA
gtcgtgacctgctcccctggcc

SEQ ID NO: 2417 - RNA, 22 nt, synthetic construct
  source 1..22: mol_type = other RNA
gtcgttgtcgaagcgcacgaac

SEQ ID NO: 2418 - RNA, 22 nt, synthetic construct
  source 1..22: mol_type = other RNA
gtctcccggtcccaatactctg

SEQ ID NO: 2419 - RNA, 22 nt, synthetic construct
  source 1..22: mol_type = other RNA
gtgaatctgcggacgctgcgcg

SEQ ID NO: 2420 - RNA, 22 nt, synthetic construct
  source 1..22: mol_type = other RNA
gtgaccccggccaggggagcag

SEQ ID NO: 2421 - RNA, 22 nt, synthetic construct
  source 1..22: mol_type = other RNA
gtgacctgctcccctggccggg

SEQ ID NO: 2422 - RNA, 22 nt, synthetic construct
  source 1..22: mol_type = other RNA
gtgagtgaccccggccagggga

SEQ ID NO: 2423 - RNA, 22 nt, synthetic construct
  source 1..22: mol_type = other RNA
gtgcgcttcgacaacgacgccg

SEQ ID NO: 2424 - RNA, 22 nt, synthetic construct
  source 1..22: mol_type = other RNA
gtgcggtgtccctggcgctccg

SEQ ID NO: 2425 - RNA, 22 nt, synthetic construct
  source 1..22: mol_type = other RNA
gtggaaatacttcaaggagtgg

SEQ ID NO: 2426 - RNA, 22 nt, synthetic construct
  source 1..22: mol_type = other RNA
gtggacgacacccagttcgtgc

SEQ ID NO: 2427 - RNA, 22 nt, synthetic construct
  source 1..22: mol_type = other RNA
gtggatggagcaggaggggtca

SEQ ID NO: 2428 - RNA, 22 nt, synthetic construct
  source 1..22: mol_type = other RNA
gtgtccctggcgctccgtgtct

SEQ ID NO: 2429 - RNA, 22 nt, synthetic construct
  source 1..22: mol_type = other RNA
gtgtcgtccacgtagcccacag

SEQ ID NO: 2430 - RNA, 22 nt, synthetic construct
  source 1..22: mol_type = other RNA
gtgtctcccggtcccaatactc

SEQ ID NO: 2431 - RNA, 22 nt, synthetic construct
  source 1..22: mol_type = other RNA
gtgtggaaatacttcaaggagt

SEQ ID NO: 2432 - RNA, 22 nt, synthetic construct
  source 1..22: mol_type = other RNA
gttcgtgcgcttcgacaacgac

SEQ ID NO: 2433 - RNA, 22 nt, synthetic construct
  source 1..22: mol_type = other RNA
gttgtcgaagcgcacgaactgg

SEQ ID NO: 2434 - RNA, 22 nt, synthetic construct
  source 1..22: mol_type = other RNA
tacaatcagagcgaggccggtg

SEQ ID NO: 2435 - RNA, 22 nt, synthetic construct
  source 1..22: mol_type = other RNA
tacgtggacgacacccagttcg

SEQ ID NO: 2436 - RNA, 22 nt, synthetic construct
  source 1..22: mol_type = other RNA
tactacaatcagagcgaggccg

SEQ ID NO: 2437 - RNA, 22 nt, synthetic construct
  source 1..22: mol_type = other RNA
tactctgacccctcctgctcca

SEQ ID NO: 2438 - RNA, 22 nt, synthetic construct
  source 1..22: mol_type = other RNA
tacttcaaggagtgggagcctg

SEQ ID NO: 2439 - RNA, 22 nt, synthetic construct
  source 1..22: mol_type = other RNA
tagcccacagagatgaagcggg

SEQ ID NO: 2440 - RNA, 22 nt, synthetic construct
  source 1..22: mol_type = other RNA
tagccgcgcagcgtccgcagat

SEQ ID NO: 2441 - RNA, 22 nt, synthetic construct
  source 1..22: mol_type = other RNA
tagtagccgcgcagcgtccgca

SEQ ID NO: 2442 - RNA, 22 nt, synthetic construct
  source 1..22: mol_type = other RNA
tattgggaccgggagacacgga

SEQ ID NO: 2443 - RNA, 22 nt, synthetic construct
  source 1..22: mol_type = other RNA
tatttccacacttccgtgtccc

SEQ ID NO: 2444 - RNA, 22 nt, synthetic construct
  source 1..22: mol_type = other RNA
tcaccggcctcgctctgattgt

SEQ ID NO: 2445 - RNA, 22 nt, synthetic construct
  source 1..22: mol_type = other RNA
tcactcaccggcctcgctctga

SEQ ID NO: 2446 - RNA, 22 nt, synthetic construct
  source 1..22: mol_type = other RNA
tcactcggaaaatctgtgcggt

SEQ ID NO: 2447 - RNA, 22 nt, synthetic construct
  source 1..22: mol_type = other RNA
tcagagcgaggccggtgagtga

SEQ ID NO: 2448 - RNA, 22 nt, synthetic construct
  source 1..22: mol_type = other RNA
tcagagtattgggaccgggaga

SEQ ID NO: 2449 - RNA, 22 nt, synthetic construct
  source 1..22: mol_type = other RNA
tcatctctgtgggctacgtgga

SEQ ID NO: 2450 - RNA, 22 nt, synthetic construct
  source 1..22: mol_type = other RNA
tccacacttccgtgtcccggcc

SEQ ID NO: 2451 - RNA, 22 nt, synthetic construct
  source 1..22: mol_type = other RNA
tccacggcgcccgcggcaccat

SEQ ID NO: 2452 - RNA, 22 nt, synthetic construct
  source 1..22: mol_type = other RNA
tccacgtagcccacagagatga

SEQ ID NO: 2453 - RNA, 22 nt, synthetic construct
  source 1..22: mol_type = other RNA
tccatccacggcgcccgcggca

SEQ ID NO: 2454 - RNA, 22 nt, synthetic construct
  source 1..22: mol_type = other RNA
tcccaatactctgacccctcct

SEQ ID NO: 2455 - RNA, 22 nt, synthetic construct
  source 1..22: mol_type = other RNA
tcccactccttgaagtatttcc

SEQ ID NO: 2456 - RNA, 22 nt, synthetic construct
  source 1..22: mol_type = other RNA
tcccctggccggggtcactcac

SEQ ID NO: 2457 - RNA, 22 nt, synthetic construct
  source 1..22: mol_type = other RNA
tcccggtcccaatactctgacc

SEQ ID NO: 2458 - RNA, 22 nt, synthetic construct
  source 1..22: mol_type = other RNA
tccctggcgctccgtgtctccc

SEQ ID NO: 2459 - RNA, 22 nt, synthetic construct
  source 1..22: mol_type = other RNA
tccgaggatggtgccgcgggcg

SEQ ID NO: 2460 - RNA, 22 nt, synthetic construct
  source 1..22: mol_type = other RNA
tccgagtgaatctgcggacgct

SEQ ID NO: 2461 - RNA, 22 nt, synthetic construct
  source 1..22: mol_type = other RNA
tccgcagattcactcggaaaat

SEQ ID NO: 2462 - RNA, 22 nt, synthetic construct
  source 1..22: mol_type = other RNA
tccgtgtctcccggtcccaata

SEQ ID NO: 2463 - RNA, 22 nt, synthetic construct
  source 1..22: mol_type = other RNA
tcctcgcccccaggctcccact

SEQ ID NO: 2464 - RNA, 22 nt, synthetic construct
  source 1..22: mol_type = other RNA
tcctcggactcgcggcgtcgtt

SEQ ID NO: 2465 - RNA, 22 nt, synthetic construct
  source 1..22: mol_type = other RNA
tcctgctccatccacggcgccc

SEQ ID NO: 2466 - RNA, 22 nt, synthetic construct
  source 1..22: mol_type = other RNA
tccttgaagtatttccacactt

SEQ ID NO: 2467 - RNA, 22 nt, synthetic construct
  source 1..22: mol_type = other RNA
tcgaagcgcacgaactgggtgt

SEQ ID NO: 2468 - RNA, 22 nt, synthetic construct
  source 1..22: mol_type = other RNA
tcgacaacgacgccgcgagtcc

SEQ ID NO: 2469 - RNA, 22 nt, synthetic construct
  source 1..22: mol_type = other RNA
tcgcccccaggctcccactcct

SEQ ID NO: 2470 - RNA, 22 nt, synthetic construct
  source 1..22: mol_type = other RNA
tcgcggcgtcgttgtcgaagcg

SEQ ID NO: 2471 - RNA, 22 nt, synthetic construct
  source 1..22: mol_type = other RNA
tcgctctgattgtagtagccgc

SEQ ID NO: 2472 - RNA, 22 nt, synthetic construct
  source 1..22: mol_type = other RNA
tcggaaaatctgtgcggtgtcc

SEQ ID NO: 2473 - RNA, 22 nt, synthetic construct
  source 1..22: mol_type = other RNA
tcggactcgcggcgtcgttgtc

SEQ ID NO: 2474 - RNA, 22 nt, synthetic construct
  source 1..22: mol_type = other RNA
tcgggccgatctcagcccctcc

SEQ ID NO: 2475 - RNA, 22 nt, synthetic construct
  source 1..22: mol_type = other RNA
tcgtccacgtagcccacagaga

SEQ ID NO: 2476 - RNA, 22 nt, synthetic construct
  source 1..22: mol_type = other RNA
tcgtgacctgctcccctggccg

SEQ ID NO: 2477 - RNA, 22 nt, synthetic construct
  source 1..22: mol_type = other RNA
tcgtgcgcttcgacaacgacgc

SEQ ID NO: 2478 - RNA, 22 nt, synthetic construct
  source 1..22: mol_type = other RNA
tcgttgtcgaagcgcacgaact

SEQ ID NO: 2479 - RNA, 22 nt, synthetic construct
  source 1..22: mol_type = other RNA
tctcccggtcccaatactctga

SEQ ID NO: 2480 - RNA, 22 nt, synthetic construct
  source 1..22: mol_type = other RNA
tctctgtgggctacgtggacga

SEQ ID NO: 2481 - RNA, 22 nt, synthetic construct
  source 1..22: mol_type = other RNA
tctgacccctcctgctccatcc

SEQ ID NO: 2482 - RNA, 22 nt, synthetic construct
  source 1..22: mol_type = other RNA
tctgattgtagtagccgcgcag

SEQ ID NO: 2483 - RNA, 22 nt, synthetic construct
  source 1..22: mol_type = other RNA
tctgcggacgctgcgcggctac

SEQ ID NO: 2484 - RNA, 22 nt, synthetic construct
  source 1..22: mol_type = other RNA
tctgtgcggtgtccctggcgct

SEQ ID NO: 2485 - RNA, 22 nt, synthetic construct
  source 1..22: mol_type = other RNA
tctgtgggctacgtggacgaca

SEQ ID NO: 2486 - RNA, 22 nt, synthetic construct
  source 1..22: mol_type = other RNA
tgaagtatttccacacttccgt

SEQ ID NO: 2487 - RNA, 22 nt, synthetic construct
  source 1..22: mol_type = other RNA
tgaatctgcggacgctgcgcgg

SEQ ID NO: 2488 - RNA, 22 nt, synthetic construct
  source 1..22: mol_type = other RNA
tgaccccggccaggggagcagg

SEQ ID NO: 2489 - RNA, 22 nt, synthetic construct
  source 1..22: mol_type = other RNA
tgacccctcctgctccatccac

SEQ ID NO: 2490 - RNA, 22 nt, synthetic construct
  source 1..22: mol_type = other RNA
tgacctgctcccctggccgggg

SEQ ID NO: 2491 - RNA, 22 nt, synthetic construct
  source 1..22: mol_type = other RNA
tgagatcggcccgaccctcctc

SEQ ID NO: 2492 - RNA, 22 nt, synthetic construct
  source 1..22: mol_type = other RNA
tgagtgaccccggccaggggag

SEQ ID NO: 2493 - RNA, 22 nt, synthetic construct
  source 1..22: mol_type = other RNA
tgattgtagtagccgcgcagcg

SEQ ID NO: 2494 - RNA, 22 nt, synthetic construct
  source 1..22: mol_type = other RNA
tgccgcgggcgccgtggatgga

SEQ ID NO: 2495 - RNA, 22 nt, synthetic construct
  source 1..22: mol_type = other RNA
tgcgcggctactacaatcagag

SEQ ID NO: 2496 - RNA, 22 nt, synthetic construct
  source 1..22: mol_type = other RNA
tgcgcttcgacaacgacgccgc

SEQ ID NO: 2497 - RNA, 22 nt, synthetic construct
  source 1..22: mol_type = other RNA
tgcggacgctgcgcggctacta

SEQ ID NO: 2498 - RNA, 22 nt, synthetic construct
  source 1..22: mol_type = other RNA
tgcggtgtccctggcgctccgt

SEQ ID NO: 2499 - RNA, 22 nt, synthetic construct
  source 1..22: mol_type = other RNA
tgctccatccacggcgcccgcg

SEQ ID NO: 2500 - RNA, 22 nt, synthetic construct
  source 1..22: mol_type = other RNA
tgctcccctggccggggtcact

SEQ ID NO: 2501 - RNA, 22 nt, synthetic construct
  source 1..22: mol_type = other RNA
tggaaatacttcaaggagtggg

SEQ ID NO: 2502 - RNA, 22 nt, synthetic construct
  source 1..22: mol_type = other RNA
tggacgacacccagttcgtgcg

SEQ ID NO: 2503 - RNA, 22 nt, synthetic construct
  source 1..22: mol_type = other RNA
tggagcaggaggggtcagagta

SEQ ID NO: 2504 - RNA, 22 nt, synthetic construct
  source 1..22: mol_type = other RNA
tggatggagcaggaggggtcag

SEQ ID NO: 2505 - RNA, 22 nt, synthetic construct
  source 1..22: mol_type = other RNA
tggccggggtcactcaccggcc

SEQ ID NO: 2506 - RNA, 22 nt, synthetic construct
  source 1..22: mol_type = other RNA
tggcgctccgtgtctcccggtc

SEQ ID NO: 2507 - RNA, 22 nt, synthetic construct
  source 1..22: mol_type = other RNA
tgggaccgggagacacggagcg

SEQ ID NO: 2508 - RNA, 22 nt, synthetic construct
  source 1..22: mol_type = other RNA
tgggctacgtggacgacaccca

SEQ ID NO: 2509 - RNA, 22 nt, synthetic construct
  source 1..22: mol_type = other RNA
tgggggcgaggaggggctgaga

SEQ ID NO: 2510 - RNA, 22 nt, synthetic construct
  source 1..22: mol_type = other RNA
tgggtgtcgtccacgtagccca

SEQ ID NO: 2511 - RNA, 22 nt, synthetic construct
  source 1..22: mol_type = other RNA
tggtgccgcgggcgccgtggat

SEQ ID NO: 2512 - RNA, 22 nt, synthetic construct
  source 1..22: mol_type = other RNA
tgtagtagccgcgcagcgtccg

SEQ ID NO: 2513 - RNA, 22 nt, synthetic construct
  source 1..22: mol_type = other RNA
tgtccctggcgctccgtgtctc

SEQ ID NO: 2514 - RNA, 22 nt, synthetic construct
  source 1..22: mol_type = other RNA
tgtcgaagcgcacgaactgggt

SEQ ID NO: 2515 - RNA, 22 nt, synthetic construct
  source 1..22: mol_type = other RNA
tgtcgtccacgtagcccacaga

SEQ ID NO: 2516 - RNA, 22 nt, synthetic construct
  source 1..22: mol_type = other RNA
tgtctcccggtcccaatactct

SEQ ID NO: 2517 - RNA, 22 nt, synthetic construct
  source 1..22: mol_type = other RNA
tgtgcggtgtccctggcgctcc

SEQ ID NO: 2518 - RNA, 22 nt, synthetic construct
  source 1..22: mol_type = other RNA
tgtggaaatacttcaaggagtg

SEQ ID NO: 2519 - RNA, 22 nt, synthetic construct
  source 1..22: mol_type = other RNA
tgtgggctacgtggacgacacc

SEQ ID NO: 2520 - RNA, 22 nt, synthetic construct
  source 1..22: mol_type = other RNA
ttcaaggagtgggagcctgggg

SEQ ID NO: 2521 - RNA, 22 nt, synthetic construct
  source 1..22: mol_type = other RNA
ttcactcggaaaatctgtgcgg

SEQ ID NO: 2522 - RNA, 22 nt, synthetic construct
  source 1..22: mol_type = other RNA
ttcatctctgtgggctacgtgg

SEQ ID NO: 2523 - RNA, 22 nt, synthetic construct
  source 1..22: mol_type = other RNA
ttccacacttccgtgtcccggc

SEQ ID NO: 2524 - RNA, 22 nt, synthetic construct
  source 1..22: mol_type = other RNA
ttccgagtgaatctgcggacgc

SEQ ID NO: 2525 - RNA, 22 nt, synthetic construct
  source 1..22: mol_type = other RNA
ttcgacaacgacgccgcgagtc

SEQ ID NO: 2526 - RNA, 22 nt, synthetic construct
  source 1..22: mol_type = other RNA
ttcgtgcgcttcgacaacgacg

SEQ ID NO: 2527 - RNA, 22 nt, synthetic construct
  source 1..22: mol_type = other RNA
ttgaagtatttccacacttccg

SEQ ID NO: 2528 - RNA, 22 nt, synthetic construct
  source 1..22: mol_type = other RNA
ttgggaccgggagacacggagc

SEQ ID NO: 2529 - RNA, 22 nt, synthetic construct
  source 1..22: mol_type = other RNA
ttgtagtagccgcgcagcgtcc

SEQ ID NO: 2530 - RNA, 22 nt, synthetic construct
  source 1..22: mol_type = other RNA
ttgtcgaagcgcacgaactggg

SEQ ID NO: 2531 - RNA, 22 nt, synthetic construct
  source 1..22: mol_type = other RNA
tttccacacttccgtgtcccgg

SEQ ID NO: 2532 - RNA, 22 nt, synthetic construct
  source 1..22: mol_type = other RNA
tttccgagtgaatctgcggacg

SEQ ID NO: 2533 - RNA, 22 nt, synthetic construct
  source 1..22: mol_type = other RNA
ttttccgagtgaatctgcggac

SEQ ID NO: 2534 - RNA, 20 nt, synthetic construct
  source 1..20: mol_type = other RNA
aaaagtcaaatgatgcctct

SEQ ID NO: 2535 - RNA, 20 nt, synthetic construct
  source 1..20: mol_type = other RNA
aaaatgcccacagggtggtg

SEQ ID NO: 2536 - RNA, 20 nt, synthetic construct
  source 1..20: mol_type = other RNA
aaagtcaaatgatgcctctg

SEQ ID NO: 2537 - RNA, 20 nt, synthetic construct
  source 1..20: mol_type = other RNA
aaatacctggagaaggggaa

SEQ ID NO: 2538 - RNA, 20 nt, synthetic construct
  source 1..20: mol_type = other RNA
aaatgatgcctctgaggcgg

SEQ ID NO: 2539 - RNA, 20 nt, synthetic construct
  source 1..20: mol_type = other RNA
aaatgcccacagggtggtgg

SEQ ID NO: 2540 - RNA, 20 nt, synthetic construct
  source 1..20: mol_type = other RNA
aacagttcgcctacgacggc

SEQ ID NO: 2541 - RNA, 20 nt, synthetic construct
  source 1..20: mol_type = other RNA
aactgttcatacccgcggag

SEQ ID NO: 2542 - RNA, 20 nt, synthetic construct
  source 1..20: mol_type = other RNA
aagacacatgcgtggagtgg

SEQ ID NO: 2543 - RNA, 20 nt, synthetic construct
  source 1..20: mol_type = other RNA
aagagggtccacagggctac

SEQ ID NO: 2544 - RNA, 20 nt, synthetic construct
  source 1..20: mol_type = other RNA
aagcagcgtctccttcccct

SEQ ID NO: 2545 - RNA, 20 nt, synthetic construct
  source 1..20: mol_type = other RNA
aagccccgcccccgtcgcca

SEQ ID NO: 2546 - RNA, 20 nt, synthetic construct
  source 1..20: mol_type = other RNA
aagcgcccgtcgggccccag

SEQ ID NO: 2547 - RNA, 20 nt, synthetic construct
  source 1..20: mol_type = other RNA
aaggagacgctgcttcacct

SEQ ID NO: 2548 - RNA, 20 nt, synthetic construct
  source 1..20: mol_type = other RNA
aaggagatgggagagtagcc

SEQ ID NO: 2549 - RNA, 20 nt, synthetic construct
  source 1..20: mol_type = other RNA
aaggattatctcaccctgaa

SEQ ID NO: 2550 - RNA, 20 nt, synthetic construct
  source 1..20: mol_type = other RNA
aaggggaaggagacgctgct

SEQ ID NO: 2551 - RNA, 20 nt, synthetic construct
  source 1..20: mol_type = other RNA
aaggggcggggccagggtct

SEQ ID NO: 2552 - RNA, 20 nt, synthetic construct
  source 1..20: mol_type = other RNA
aagtcaaatgatgcctctga

SEQ ID NO: 2553 - RNA, 20 nt, synthetic construct
  source 1..20: mol_type = other RNA
aatacctggagaaggggaag

SEQ ID NO: 2554 - RNA, 20 nt, synthetic construct
  source 1..20: mol_type = other RNA
aatccttgccgtcgtaggcg

SEQ ID NO: 2555 - RNA, 20 nt, synthetic construct
  source 1..20: mol_type = other RNA
aatgaggacctgcgctcctg

SEQ ID NO: 2556 - RNA, 20 nt, synthetic construct
  source 1..20: mol_type = other RNA
aatgatgcctctgaggcgga

SEQ ID NO: 2557 - RNA, 20 nt, synthetic construct
  source 1..20: mol_type = other RNA
aatgcccacagggtggtggc

SEQ ID NO: 2558 - RNA, 20 nt, synthetic construct
  source 1..20: mol_type = other RNA
acaaatacctggagaagggg

SEQ ID NO: 2559 - RNA, 20 nt, synthetic construct
  source 1..20: mol_type = other RNA
acacatgcgtggagtggctc

SEQ ID NO: 2560 - RNA, 20 nt, synthetic construct
  source 1..20: mol_type = other RNA
acaccctgcagtggatgcat

SEQ ID NO: 2561 - RNA, 20 nt, synthetic construct
  source 1..20: mol_type = other RNA
acacggcggctcagatctcc

SEQ ID NO: 2562 - RNA, 20 nt, synthetic construct
  source 1..20: mol_type = other RNA
acagggtggtggcgacgggg

SEQ ID NO: 2563 - RNA, 20 nt, synthetic construct
  source 1..20: mol_type = other RNA
acagttcgcctacgacggca

SEQ ID NO: 2564 - RNA, 20 nt, synthetic construct
  source 1..20: mol_type = other RNA
acatgcgtggagtggctcca

SEQ ID NO: 2565 - RNA, 20 nt, synthetic construct
  source 1..20: mol_type = other RNA
accaagccccgcccccgtcg

SEQ ID NO: 2566 - RNA, 20 nt, synthetic construct
  source 1..20: mol_type = other RNA
accagagagcctacctggaa

SEQ ID NO: 2567 - RNA, 20 nt, synthetic construct
  source 1..20: mol_type = other RNA
acccaggtgaagcagcgtct

SEQ ID NO: 2568 - RNA, 20 nt, synthetic construct
  source 1..20: mol_type = other RNA
accctcttacccaggtgaag

SEQ ID NO: 2569 - RNA, 20 nt, synthetic construct
  source 1..20: mol_type = other RNA
accctgaatgaggacctgcg

SEQ ID NO: 2570 - RNA, 20 nt, synthetic construct
  source 1..20: mol_type = other RNA
accctgcagtggatgcatgg

SEQ ID NO: 2571 - RNA, 20 nt, synthetic construct
  source 1..20: mol_type = other RNA
accctggccccgccccttag

SEQ ID NO: 2572 - RNA, 20 nt, synthetic construct
  source 1..20: mol_type = other RNA
accgcggtccaggagcgcag

SEQ ID NO: 2573 - RNA, 20 nt, synthetic construct
  source 1..20: mol_type = other RNA
accgcggtggacacggcggc

SEQ ID NO: 2574 - RNA, 20 nt, synthetic construct
  source 1..20: mol_type = other RNA
acctgcgctcctggaccgcg

SEQ ID NO: 2575 - RNA, 20 nt, synthetic construct
  source 1..20: mol_type = other RNA
acctggaagacacatgcgtg

SEQ ID NO: 2576 - RNA, 20 nt, synthetic construct
  source 1..20: mol_type = other RNA
acctggagaaggggaaggag

SEQ ID NO: 2577 - RNA, 20 nt, synthetic construct
  source 1..20: mol_type = other RNA
acctgggtaagagggtccac

SEQ ID NO: 2578 - RNA, 20 nt, synthetic construct
  source 1..20: mol_type = other RNA
acgacggcaaggattatctc

SEQ ID NO: 2579 - RNA, 20 nt, synthetic construct
  source 1..20: mol_type = other RNA
acgcatgtgtcttccaggta

SEQ ID NO: 2580 - RNA, 20 nt, synthetic construct
  source 1..20: mol_type = other RNA
acgctgcttcacctgggtaa

SEQ ID NO: 2581 - RNA, 20 nt, synthetic construct
  source 1..20: mol_type = other RNA
acggcaaggattatctcacc

SEQ ID NO: 2582 - RNA, 20 nt, synthetic construct
  source 1..20: mol_type = other RNA
acggcggctcagatctccga

SEQ ID NO: 2583 - RNA, 20 nt, synthetic construct
  source 1..20: mol_type = other RNA
acgggggcggggcttggtgg

SEQ ID NO: 2584 - RNA, 20 nt, synthetic construct
  source 1..20: mol_type = other RNA
actaaggggcggggccaggg

SEQ ID NO: 2585 - RNA, 20 nt, synthetic construct
  source 1..20: mol_type = other RNA
actccacgcatgtgtcttcc

SEQ ID NO: 2586 - RNA, 20 nt, synthetic construct
  source 1..20: mol_type = other RNA
actgactaaggggcggggcc

SEQ ID NO: 2587 - RNA, 20 nt, synthetic construct
  source 1..20: mol_type = other RNA
actgcagggtgtgagaccct

SEQ ID NO: 2588 - RNA, 20 nt, synthetic construct
  source 1..20: mol_type = other RNA
actgttcatacccgcggagg

SEQ ID NO: 2589 - RNA, 20 nt, synthetic construct
  source 1..20: mol_type = other RNA
acttttgctcggagatctga

SEQ ID NO: 2590 - RNA, 20 nt, synthetic construct
  source 1..20: mol_type = other RNA
agaaggagatgggagagtag

SEQ ID NO: 2591 - RNA, 20 nt, synthetic construct
  source 1..20: mol_type = other RNA
agaaggggaaggagacgctg

SEQ ID NO: 2592 - RNA, 20 nt, synthetic construct
  source 1..20: mol_type = other RNA
agacacatgcgtggagtggc

SEQ ID NO: 2593 - RNA, 20 nt, synthetic construct
  source 1..20: mol_type = other RNA
agaccctggccccgcccctt

SEQ ID NO: 2594 - RNA, 20 nt, synthetic construct
  source 1..20: mol_type = other RNA
agacgctgcttcacctgggt

SEQ ID NO: 2595 - RNA, 20 nt, synthetic construct
  source 1..20: mol_type = other RNA
agagagcctacctggaagac

SEQ ID NO: 2596 - RNA, 20 nt, synthetic construct
  source 1..20: mol_type = other RNA
agagcctacctggaagacac

SEQ ID NO: 2597 - RNA, 20 nt, synthetic construct
  source 1..20: mol_type = other RNA
agaggcatcatttgactttt

SEQ ID NO: 2598 - RNA, 20 nt, synthetic construct
  source 1..20: mol_type = other RNA
agagggtccacagggctact

SEQ ID NO: 2599 - RNA, 20 nt, synthetic construct
  source 1..20: mol_type = other RNA
agagtagccctgtggaccct

SEQ ID NO: 2600 - RNA, 20 nt, synthetic construct
  source 1..20: mol_type = other RNA
agataatccttgccgtcgta

SEQ ID NO: 2601 - RNA, 20 nt, synthetic construct
  source 1..20: mol_type = other RNA
agatctccgagcaaaagtca

SEQ ID NO: 2602 - RNA, 20 nt, synthetic construct
  source 1..20: mol_type = other RNA
agatctgagccgccgtgtcc

SEQ ID NO: 2603 - RNA, 20 nt, synthetic construct
  source 1..20: mol_type = other RNA
agatgggagagtagccctgt

SEQ ID NO: 2604 - RNA, 20 nt, synthetic construct
  source 1..20: mol_type = other RNA
agcaaaagtcaaatgatgcc

SEQ ID NO: 2605 - RNA, 20 nt, synthetic construct
  source 1..20: mol_type = other RNA
agcaccagagagcctacctg

SEQ ID NO: 2606 - RNA, 20 nt, synthetic construct
  source 1..20: mol_type = other RNA
agcagcgtctccttcccctt

SEQ ID NO: 2607 - RNA, 20 nt, synthetic construct
  source 1..20: mol_type = other RNA
agccactccacgcatgtgtc

SEQ ID NO: 2608 - RNA, 20 nt, synthetic construct
  source 1..20: mol_type = other RNA
agccatgcatccactgcagg

SEQ ID NO: 2609 - RNA, 20 nt, synthetic construct
  source 1..20: mol_type = other RNA
agccctgtggaccctcttac

SEQ ID NO: 2610 - RNA, 20 nt, synthetic construct
  source 1..20: mol_type = other RNA
agccgccgtgtccaccgcgg

SEQ ID NO: 2611 - RNA, 20 nt, synthetic construct
  source 1..20: mol_type = other RNA
agcctacctggaagacacat

SEQ ID NO: 2612 - RNA, 20 nt, synthetic construct
  source 1..20: mol_type = other RNA
agcgcaggtcctcattcagg

SEQ ID NO: 2613 - RNA, 20 nt, synthetic construct
  source 1..20: mol_type = other RNA
agcgtctccttccccttctc

SEQ ID NO: 2614 - RNA, 20 nt, synthetic construct
  source 1..20: mol_type = other RNA
agctcgcagccatgcatcca

SEQ ID NO: 2615 - RNA, 20 nt, synthetic construct
  source 1..20: mol_type = other RNA
aggaagcgcccgtcgggccc

SEQ ID NO: 2616 - RNA, 20 nt, synthetic construct
  source 1..20: mol_type = other RNA
aggacctgcgctcctggacc

SEQ ID NO: 2617 - RNA, 20 nt, synthetic construct
  source 1..20: mol_type = other RNA
aggagacgctgcttcacctg

SEQ ID NO: 2618 - RNA, 20 nt, synthetic construct
  source 1..20: mol_type = other RNA
aggagatgggagagtagccc

SEQ ID NO: 2619 - RNA, 20 nt, synthetic construct
  source 1..20: mol_type = other RNA
aggagcgcaggtcctcattc

SEQ ID NO: 2620 - RNA, 20 nt, synthetic construct
  source 1..20: mol_type = other RNA
aggattatctcaccctgaat

SEQ ID NO: 2621 - RNA, 20 nt, synthetic construct
  source 1..20: mol_type = other RNA
aggcatcatttgacttttgc

SEQ ID NO: 2622 - RNA, 20 nt, synthetic construct
  source 1..20: mol_type = other RNA
aggcgaactgttcatacccg

SEQ ID NO: 2623 - RNA, 20 nt, synthetic construct
  source 1..20: mol_type = other RNA
aggcggagcaccagagagcc

SEQ ID NO: 2624 - RNA, 20 nt, synthetic construct
  source 1..20: mol_type = other RNA
aggctctctggtgctccgcc

SEQ ID NO: 2625 - RNA, 20 nt, synthetic construct
  source 1..20: mol_type = other RNA
aggggaaggagacgctgctt

SEQ ID NO: 2626 - RNA, 20 nt, synthetic construct
  source 1..20: mol_type = other RNA
aggggcggggccagggtctc

SEQ ID NO: 2627 - RNA, 20 nt, synthetic construct
  source 1..20: mol_type = other RNA
agggtccacagggctactct

SEQ ID NO: 2628 - RNA, 20 nt, synthetic construct
  source 1..20: mol_type = other RNA
agggtctcacaccctgcagt

SEQ ID NO: 2629 - RNA, 20 nt, synthetic construct
  source 1..20: mol_type = other RNA
agggtgagataatccttgcc

SEQ ID NO: 2630 - RNA, 20 nt, synthetic construct
  source 1..20: mol_type = other RNA
agggtggtggcgacgggggc

SEQ ID NO: 2631 - RNA, 20 nt, synthetic construct
  source 1..20: mol_type = other RNA
agggtgtgagaccctggccc

SEQ ID NO: 2632 - RNA, 20 nt, synthetic construct
  source 1..20: mol_type = other RNA
aggtaggctctctggtgctc

SEQ ID NO: 2633 - RNA, 20 nt, synthetic construct
  source 1..20: mol_type = other RNA
aggtatttgtggagccactc

SEQ ID NO: 2634 - RNA, 20 nt, synthetic construct
  source 1..20: mol_type = other RNA
aggtcctcattcagggtgag

SEQ ID NO: 2635 - RNA, 20 nt, synthetic construct
  source 1..20: mol_type = other RNA
aggtgaagcagcgtctcctt

SEQ ID NO: 2636 - RNA, 20 nt, synthetic construct
  source 1..20: mol_type = other RNA
agtagccctgtggaccctct

SEQ ID NO: 2637 - RNA, 20 nt, synthetic construct
  source 1..20: mol_type = other RNA
agtcaaatgatgcctctgag

SEQ ID NO: 2638 - RNA, 20 nt, synthetic construct
  source 1..20: mol_type = other RNA
agtcagtcccgcccaccaag

SEQ ID NO: 2639 - RNA, 20 nt, synthetic construct
  source 1..20: mol_type = other RNA
agtcccgcccaccaagcccc

SEQ ID NO: 2640 - RNA, 20 nt, synthetic construct
  source 1..20: mol_type = other RNA
agtggatgcatggctgcgag

SEQ ID NO: 2641 - RNA, 20 nt, synthetic construct
  source 1..20: mol_type = other RNA
agtggctccacaaatacctg

SEQ ID NO: 2642 - RNA, 20 nt, synthetic construct
  source 1..20: mol_type = other RNA
agttcgcctacgacggcaag

SEQ ID NO: 2643 - RNA, 20 nt, synthetic construct
  source 1..20: mol_type = other RNA
ataatccttgccgtcgtagg

SEQ ID NO: 2644 - RNA, 20 nt, synthetic construct
  source 1..20: mol_type = other RNA
atacctggagaaggggaagg

SEQ ID NO: 2645 - RNA, 20 nt, synthetic construct
  source 1..20: mol_type = other RNA
atcatttgacttttgctcgg

SEQ ID NO: 2646 - RNA, 20 nt, synthetic construct
  source 1..20: mol_type = other RNA
atccactgcagggtgtgaga

SEQ ID NO: 2647 - RNA, 20 nt, synthetic construct
  source 1..20: mol_type = other RNA
atccttgccgtcgtaggcga

SEQ ID NO: 2648 - RNA, 20 nt, synthetic construct
  source 1..20: mol_type = other RNA
atctcaccctgaatgaggac

SEQ ID NO: 2649 - RNA, 20 nt, synthetic construct
  source 1..20: mol_type = other RNA
atctccgagcaaaagtcaaa

SEQ ID NO: 2650 - RNA, 20 nt, synthetic construct
  source 1..20: mol_type = other RNA
atctgagccgccgtgtccac

SEQ ID NO: 2651 - RNA, 20 nt, synthetic construct
  source 1..20: mol_type = other RNA
atgaacagttcgcctacgac

SEQ ID NO: 2652 - RNA, 20 nt, synthetic construct
  source 1..20: mol_type = other RNA
atgaggacctgcgctcctgg

SEQ ID NO: 2653 - RNA, 20 nt, synthetic construct
  source 1..20: mol_type = other RNA
atgatgcctctgaggcggag

SEQ ID NO: 2654 - RNA, 20 nt, synthetic construct
  source 1..20: mol_type = other RNA
atgcatccactgcagggtgt

SEQ ID NO: 2655 - RNA, 20 nt, synthetic construct
  source 1..20: mol_type = other RNA
atgcatggctgcgagctggg

SEQ ID NO: 2656 - RNA, 20 nt, synthetic construct
  source 1..20: mol_type = other RNA
atgcccacagggtggtggcg

SEQ ID NO: 2657 - RNA, 20 nt, synthetic construct
  source 1..20: mol_type = other RNA
atgcctctgaggcggagcac

SEQ ID NO: 2658 - RNA, 20 nt, synthetic construct
  source 1..20: mol_type = other RNA
atgcgtggagtggctccaca

SEQ ID NO: 2659 - RNA, 20 nt, synthetic construct
  source 1..20: mol_type = other RNA
atggctgcgagctggggccc

SEQ ID NO: 2660 - RNA, 20 nt, synthetic construct
  source 1..20: mol_type = other RNA
atgggagagtagccctgtgg

SEQ ID NO: 2661 - RNA, 20 nt, synthetic construct
  source 1..20: mol_type = other RNA
atgtgtcttccaggtaggct

SEQ ID NO: 2662 - RNA, 20 nt, synthetic construct
  source 1..20: mol_type = other RNA
attatctcaccctgaatgag

SEQ ID NO: 2663 - RNA, 20 nt, synthetic construct
  source 1..20: mol_type = other RNA
attcagggtgagataatcct

SEQ ID NO: 2664 - RNA, 20 nt, synthetic construct
  source 1..20: mol_type = other RNA
atttgacttttgctcggaga

SEQ ID NO: 2665 - RNA, 20 nt, synthetic construct
  source 1..20: mol_type = other RNA
atttgtggagccactccacg

SEQ ID NO: 2666 - RNA, 20 nt, synthetic construct
  source 1..20: mol_type = other RNA
caaaagtcaaatgatgcctc

SEQ ID NO: 2667 - RNA, 20 nt, synthetic construct
  source 1..20: mol_type = other RNA
caaatacctggagaagggga

SEQ ID NO: 2668 - RNA, 20 nt, synthetic construct
  source 1..20: mol_type = other RNA
caaatgatgcctctgaggcg

SEQ ID NO: 2669 - RNA, 20 nt, synthetic construct
  source 1..20: mol_type = other RNA
caaggattatctcaccctga

SEQ ID NO: 2670 - RNA, 20 nt, synthetic construct
  source 1..20: mol_type = other RNA
cacaaatacctggagaaggg

SEQ ID NO: 2671 - RNA, 20 nt, synthetic construct
  source 1..20: mol_type = other RNA
cacaccctgcagtggatgca

SEQ ID NO: 2672 - RNA, 20 nt, synthetic construct
  source 1..20: mol_type = other RNA
cacagggtggtggcgacggg

SEQ ID NO: 2673 - RNA, 20 nt, synthetic construct
  source 1..20: mol_type = other RNA
cacatgcgtggagtggctcc

SEQ ID NO: 2674 - RNA, 20 nt, synthetic construct
  source 1..20: mol_type = other RNA
caccaagccccgcccccgtc

SEQ ID NO: 2675 - RNA, 20 nt, synthetic construct
  source 1..20: mol_type = other RNA
caccagagagcctacctgga

SEQ ID NO: 2676 - RNA, 20 nt, synthetic construct
  source 1..20: mol_type = other RNA
caccctgaatgaggacctgc

SEQ ID NO: 2677 - RNA, 20 nt, synthetic construct
  source 1..20: mol_type = other RNA
caccctgcagtggatgcatg

SEQ ID NO: 2678 - RNA, 20 nt, synthetic construct
  source 1..20: mol_type = other RNA
caccgcggtccaggagcgca

SEQ ID NO: 2679 - RNA, 20 nt, synthetic construct
  source 1..20: mol_type = other RNA
cacctgggtaagagggtcca

SEQ ID NO: 2680 - RNA, 20 nt, synthetic construct
  source 1..20: mol_type = other RNA
cacgcatgtgtcttccaggt

SEQ ID NO: 2681 - RNA, 20 nt, synthetic construct
  source 1..20: mol_type = other RNA
cacggcggctcagatctccg

SEQ ID NO: 2682 - RNA, 20 nt, synthetic construct
  source 1..20: mol_type = other RNA
cactccacgcatgtgtcttc

SEQ ID NO: 2683 - RNA, 20 nt, synthetic construct
  source 1..20: mol_type = other RNA
cactgcagggtgtgagaccc

SEQ ID NO: 2684 - RNA, 20 nt, synthetic construct
  source 1..20: mol_type = other RNA
cagagagcctacctggaaga

SEQ ID NO: 2685 - RNA, 20 nt, synthetic construct
  source 1..20: mol_type = other RNA
cagaggcatcatttgacttt

SEQ ID NO: 2686 - RNA, 20 nt, synthetic construct
  source 1..20: mol_type = other RNA
cagatctccgagcaaaagtc

SEQ ID NO: 2687 - RNA, 20 nt, synthetic construct
  source 1..20: mol_type = other RNA
cagccatgcatccactgcag

SEQ ID NO: 2688 - RNA, 20 nt, synthetic construct
  source 1..20: mol_type = other RNA
cagcgtctccttccccttct

SEQ ID NO: 2689 - RNA, 20 nt, synthetic construct
  source 1..20: mol_type = other RNA
cagctcgcagccatgcatcc

SEQ ID NO: 2690 - RNA, 20 nt, synthetic construct
  source 1..20: mol_type = other RNA
caggagcgcaggtcctcatt

SEQ ID NO: 2691 - RNA, 20 nt, synthetic construct
  source 1..20: mol_type = other RNA
cagggtctcacaccctgcag

SEQ ID NO: 2692 - RNA, 20 nt, synthetic construct
  source 1..20: mol_type = other RNA
cagggtgagataatccttgc

SEQ ID NO: 2693 - RNA, 20 nt, synthetic construct
  source 1..20: mol_type = other RNA
cagggtggtggcgacggggg

SEQ ID NO: 2694 - RNA, 20 nt, synthetic construct
  source 1..20: mol_type = other RNA
cagggtgtgagaccctggcc

SEQ ID NO: 2695 - RNA, 20 nt, synthetic construct
  source 1..20: mol_type = other RNA
caggtaggctctctggtgct

SEQ ID NO: 2696 - RNA, 20 nt, synthetic construct
  source 1..20: mol_type = other RNA
caggtatttgtggagccact

SEQ ID NO: 2697 - RNA, 20 nt, synthetic construct
  source 1..20: mol_type = other RNA
caggtcctcattcagggtga

SEQ ID NO: 2698 - RNA, 20 nt, synthetic construct
  source 1..20: mol_type = other RNA
caggtgaagcagcgtctcct

SEQ ID NO: 2699 - RNA, 20 nt, synthetic construct
  source 1..20: mol_type = other RNA
cagtcccgcccaccaagccc

SEQ ID NO: 2700 - RNA, 20 nt, synthetic construct
  source 1..20: mol_type = other RNA
cagtggatgcatggctgcga

SEQ ID NO: 2701 - RNA, 20 nt, synthetic construct
  source 1..20: mol_type = other RNA
cagttcgcctacgacggcaa

SEQ ID NO: 2702 - RNA, 20 nt, synthetic construct
  source 1..20: mol_type = other RNA
catcatttgacttttgctcg

SEQ ID NO: 2703 - RNA, 20 nt, synthetic construct
  source 1..20: mol_type = other RNA
catccactgcagggtgtgag

SEQ ID NO: 2704 - RNA, 20 nt, synthetic construct
  source 1..20: mol_type = other RNA
catgcatccactgcagggtg

SEQ ID NO: 2705 - RNA, 20 nt, synthetic construct
  source 1..20: mol_type = other RNA
catgcgtggagtggctccac

SEQ ID NO: 2706 - RNA, 20 nt, synthetic construct
  source 1..20: mol_type = other RNA
catggctgcgagctggggcc

SEQ ID NO: 2707 - RNA, 20 nt, synthetic construct
  source 1..20: mol_type = other RNA
catgtgtcttccaggtaggc

SEQ ID NO: 2708 - RNA, 20 nt, synthetic construct
  source 1..20: mol_type = other RNA
cattcagggtgagataatcc

SEQ ID NO: 2709 - RNA, 20 nt, synthetic construct
  source 1..20: mol_type = other RNA
catttgacttttgctcggag

SEQ ID NO: 2710 - RNA, 20 nt, synthetic construct
  source 1..20: mol_type = other RNA
ccacaaatacctggagaagg

SEQ ID NO: 2711 - RNA, 20 nt, synthetic construct
  source 1..20: mol_type = other RNA
ccacagggctactctcccat

SEQ ID NO: 2712 - RNA, 20 nt, synthetic construct
  source 1..20: mol_type = other RNA
ccacagggtggtggcgacgg

SEQ ID NO: 2713 - RNA, 20 nt, synthetic construct
  source 1..20: mol_type = other RNA
ccaccaagccccgcccccgt

SEQ ID NO: 2714 - RNA, 20 nt, synthetic construct
  source 1..20: mol_type = other RNA
ccaccgcggtccaggagcgc

SEQ ID NO: 2715 - RNA, 20 nt, synthetic construct
  source 1..20: mol_type = other RNA
ccacgcatgtgtcttccagg

SEQ ID NO: 2716 - RNA, 20 nt, synthetic construct
  source 1..20: mol_type = other RNA
ccactccacgcatgtgtctt

SEQ ID NO: 2717 - RNA, 20 nt, synthetic construct
  source 1..20: mol_type = other RNA
ccactgcagggtgtgagacc

SEQ ID NO: 2718 - RNA, 20 nt, synthetic construct
  source 1..20: mol_type = other RNA
ccagagagcctacctggaag

SEQ ID NO: 2719 - RNA, 20 nt, synthetic construct
  source 1..20: mol_type = other RNA
ccagctcgcagccatgcatc

SEQ ID NO: 2720 - RNA, 20 nt, synthetic construct
  source 1..20: mol_type = other RNA
ccaggagcgcaggtcctcat

SEQ ID NO: 2721 - RNA, 20 nt, synthetic construct
  source 1..20: mol_type = other RNA
ccagggtctcacaccctgca

SEQ ID NO: 2722 - RNA, 20 nt, synthetic construct
  source 1..20: mol_type = other RNA
ccaggtaggctctctggtgc

SEQ ID NO: 2723 - RNA, 20 nt, synthetic construct
  source 1..20: mol_type = other RNA
ccaggtatttgtggagccac

SEQ ID NO: 2724 - RNA, 20 nt, synthetic construct
  source 1..20: mol_type = other RNA
ccaggtgaagcagcgtctcc

SEQ ID NO: 2725 - RNA, 20 nt, synthetic construct
  source 1..20: mol_type = other RNA
ccatgcatccactgcagggt

SEQ ID NO: 2726 - RNA, 20 nt, synthetic construct
  source 1..20: mol_type = other RNA
cccacagggtggtggcgacg

SEQ ID NO: 2727 - RNA, 20 nt, synthetic construct
  source 1..20: mol_type = other RNA
cccagctcgcagccatgcat

SEQ ID NO: 2728 - RNA, 20 nt, synthetic construct
  source 1..20: mol_type = other RNA
cccaggtgaagcagcgtctc

SEQ ID NO: 2729 - RNA, 20 nt, synthetic construct
  source 1..20: mol_type = other RNA
ccccagctcgcagccatgca

SEQ ID NO: 2730 - RNA, 20 nt, synthetic construct
  source 1..20: mol_type = other RNA
cccccgtcgccaccaccctg

SEQ ID NO: 2731 - RNA, 20 nt, synthetic construct
  source 1..20: mol_type = other RNA
ccccgccccttagtcagtcc

SEQ ID NO: 2732 - RNA, 20 nt, synthetic construct
  source 1..20: mol_type = other RNA
ccccgtcgccaccaccctgt

SEQ ID NO: 2733 - RNA, 20 nt, synthetic construct
  source 1..20: mol_type = other RNA
ccccttagtcagtcccgccc

SEQ ID NO: 2734 - RNA, 20 nt, synthetic construct
  source 1..20: mol_type = other RNA
ccccttctccaggtatttgt

SEQ ID NO: 2735 - RNA, 20 nt, synthetic construct
  source 1..20: mol_type = other RNA
cccgccccttagtcagtccc

SEQ ID NO: 2736 - RNA, 20 nt, synthetic construct
  source 1..20: mol_type = other RNA
cccgtcgccaccaccctgtg

SEQ ID NO: 2737 - RNA, 20 nt, synthetic construct
  source 1..20: mol_type = other RNA
ccctcttacccaggtgaagc

SEQ ID NO: 2738 - RNA, 20 nt, synthetic construct
  source 1..20: mol_type = other RNA
ccctgaatgaggacctgcgc

SEQ ID NO: 2739 - RNA, 20 nt, synthetic construct
  source 1..20: mol_type = other RNA
ccctgcagtggatgcatggc

SEQ ID NO: 2740 - RNA, 20 nt, synthetic construct
  source 1..20: mol_type = other RNA
ccctggccccgccccttagt

SEQ ID NO: 2741 - RNA, 20 nt, synthetic construct
  source 1..20: mol_type = other RNA
ccctgtggaccctcttaccc

SEQ ID NO: 2742 - RNA, 20 nt, synthetic construct
  source 1..20: mol_type = other RNA
cccttagtcagtcccgccca

SEQ ID NO: 2743 - RNA, 20 nt, synthetic construct
  source 1..20: mol_type = other RNA
cccttctccaggtatttgtg

SEQ ID NO: 2744 - RNA, 20 nt, synthetic construct
  source 1..20: mol_type = other RNA
ccgagcaaaagtcaaatgat

SEQ ID NO: 2745 - RNA, 20 nt, synthetic construct
  source 1..20: mol_type = other RNA
ccgccccttagtcagtcccg

SEQ ID NO: 2746 - RNA, 20 nt, synthetic construct
  source 1..20: mol_type = other RNA
ccgccgtgtccaccgcggtc

SEQ ID NO: 2747 - RNA, 20 nt, synthetic construct
  source 1..20: mol_type = other RNA
ccgcctcagaggcatcattt

SEQ ID NO: 2748 - RNA, 20 nt, synthetic construct
  source 1..20: mol_type = other RNA
ccgcgggtatgaacagttcg

SEQ ID NO: 2749 - RNA, 20 nt, synthetic construct
  source 1..20: mol_type = other RNA
ccgcggtccaggagcgcagg

SEQ ID NO: 2750 - RNA, 20 nt, synthetic construct
  source 1..20: mol_type = other RNA
ccgcggtggacacggcggct

SEQ ID NO: 2751 - RNA, 20 nt, synthetic construct
  source 1..20: mol_type = other RNA
ccgtcgggccccagctcgca

SEQ ID NO: 2752 - RNA, 20 nt, synthetic construct
  source 1..20: mol_type = other RNA
ccgtcgtaggcgaactgttc

SEQ ID NO: 2753 - RNA, 20 nt, synthetic construct
  source 1..20: mol_type = other RNA
ccgtgtccaccgcggtccag

SEQ ID NO: 2754 - RNA, 20 nt, synthetic construct
  source 1..20: mol_type = other RNA
cctacctggaagacacatgc

SEQ ID NO: 2755 - RNA, 20 nt, synthetic construct
  source 1..20: mol_type = other RNA
cctacgacggcaaggattat

SEQ ID NO: 2756 - RNA, 20 nt, synthetic construct
  source 1..20: mol_type = other RNA
cctcagaggcatcatttgac

SEQ ID NO: 2757 - RNA, 20 nt, synthetic construct
  source 1..20: mol_type = other RNA
cctcattcagggtgagataa

SEQ ID NO: 2758 - RNA, 20 nt, synthetic construct
  source 1..20: mol_type = other RNA
cctccgcgggtatgaacagt

SEQ ID NO: 2759 - RNA, 20 nt, synthetic construct
  source 1..20: mol_type = other RNA
cctctgaggcggagcaccag

SEQ ID NO: 2760 - RNA, 20 nt, synthetic construct
  source 1..20: mol_type = other RNA
cctcttacccaggtgaagca

SEQ ID NO: 2761 - RNA, 20 nt, synthetic construct
  source 1..20: mol_type = other RNA
cctgaatgaggacctgcgct

SEQ ID NO: 2762 - RNA, 20 nt, synthetic construct
  source 1..20: mol_type = other RNA
cctgcagtggatgcatggct

SEQ ID NO: 2763 - RNA, 20 nt, synthetic construct
  source 1..20: mol_type = other RNA
cctgcgctcctggaccgcgg

SEQ ID NO: 2764 - RNA, 20 nt, synthetic construct
  source 1..20: mol_type = other RNA
cctggaagacacatgcgtgg

SEQ ID NO: 2765 - RNA, 20 nt, synthetic construct
  source 1..20: mol_type = other RNA
cctggaccgcggtggacacg

SEQ ID NO: 2766 - RNA, 20 nt, synthetic construct
  source 1..20: mol_type = other RNA
cctggagaaggggaaggaga

SEQ ID NO: 2767 - RNA, 20 nt, synthetic construct
  source 1..20: mol_type = other RNA
cctggccccgccccttagtc

SEQ ID NO: 2768 - RNA, 20 nt, synthetic construct
  source 1..20: mol_type = other RNA
cctgggtaagagggtccaca

SEQ ID NO: 2769 - RNA, 20 nt, synthetic construct
  source 1..20: mol_type = other RNA
cctgtggaccctcttaccca

SEQ ID NO: 2770 - RNA, 20 nt, synthetic construct
  source 1..20: mol_type = other RNA
ccttagtcagtcccgcccac

SEQ ID NO: 2771 - RNA, 20 nt, synthetic construct
  source 1..20: mol_type = other RNA
ccttccccttctccaggtat

SEQ ID NO: 2772 - RNA, 20 nt, synthetic construct
  source 1..20: mol_type = other RNA
ccttctccaggtatttgtgg

SEQ ID NO: 2773 - RNA, 20 nt, synthetic construct
  source 1..20: mol_type = other RNA
ccttgccgtcgtaggcgaac

SEQ ID NO: 2774 - RNA, 20 nt, synthetic construct
  source 1..20: mol_type = other RNA
cgaactgttcatacccgcgg

SEQ ID NO: 2775 - RNA, 20 nt, synthetic construct
  source 1..20: mol_type = other RNA
cgacggcaaggattatctca

SEQ ID NO: 2776 - RNA, 20 nt, synthetic construct
  source 1..20: mol_type = other RNA
cgacgggggcggggcttggt

SEQ ID NO: 2777 - RNA, 20 nt, synthetic construct
  source 1..20: mol_type = other RNA
cgagcaaaagtcaaatgatg

SEQ ID NO: 2778 - RNA, 20 nt, synthetic construct
  source 1..20: mol_type = other RNA
cgcagccatgcatccactgc

SEQ ID NO: 2779 - RNA, 20 nt, synthetic construct
  source 1..20: mol_type = other RNA
cgcaggtcctcattcagggt

SEQ ID NO: 2780 - RNA, 20 nt, synthetic construct
  source 1..20: mol_type = other RNA
cgcatgtgtcttccaggtag

SEQ ID NO: 2781 - RNA, 20 nt, synthetic construct
  source 1..20: mol_type = other RNA
cgccccttagtcagtcccgc

SEQ ID NO: 2782 - RNA, 20 nt, synthetic construct
  source 1..20: mol_type = other RNA
cgccgtgtccaccgcggtcc

SEQ ID NO: 2783 - RNA, 20 nt, synthetic construct
  source 1..20: mol_type = other RNA
cgcctacgacggcaaggatt

SEQ ID NO: 2784 - RNA, 20 nt, synthetic construct
  source 1..20: mol_type = other RNA
cgcctcagaggcatcatttg

SEQ ID NO: 2785 - RNA, 20 nt, synthetic construct
  source 1..20: mol_type = other RNA
cgcggaggaagcgcccgtcg

SEQ ID NO: 2786 - RNA, 20 nt, synthetic construct
  source 1..20: mol_type = other RNA
cgcgggtatgaacagttcgc

SEQ ID NO: 2787 - RNA, 20 nt, synthetic construct
  source 1..20: mol_type = other RNA
cgcggtccaggagcgcaggt

SEQ ID NO: 2788 - RNA, 20 nt, synthetic construct
  source 1..20: mol_type = other RNA
cgcggtggacacggcggctc

SEQ ID NO: 2789 - RNA, 20 nt, synthetic construct
  source 1..20: mol_type = other RNA
cgctcctggaccgcggtgga

SEQ ID NO: 2790 - RNA, 20 nt, synthetic construct
  source 1..20: mol_type = other RNA
cgctgcttcacctgggtaag

SEQ ID NO: 2791 - RNA, 20 nt, synthetic construct
  source 1..20: mol_type = other RNA
cgcttcctccgcgggtatga

SEQ ID NO: 2792 - RNA, 20 nt, synthetic construct
  source 1..20: mol_type = other RNA
cggagatctgagccgccgtg

SEQ ID NO: 2793 - RNA, 20 nt, synthetic construct
  source 1..20: mol_type = other RNA
cggagcaccagagagcctac

SEQ ID NO: 2794 - RNA, 20 nt, synthetic construct
  source 1..20: mol_type = other RNA
cggaggaagcgcccgtcggg

SEQ ID NO: 2795 - RNA, 20 nt, synthetic construct
  source 1..20: mol_type = other RNA
cggcaaggattatctcaccc

SEQ ID NO: 2796 - RNA, 20 nt, synthetic construct
  source 1..20: mol_type = other RNA
cggcggctcagatctccgag

SEQ ID NO: 2797 - RNA, 20 nt, synthetic construct
  source 1..20: mol_type = other RNA
cggctcagatctccgagcaa

SEQ ID NO: 2798 - RNA, 20 nt, synthetic construct
  source 1..20: mol_type = other RNA
cgggactgactaaggggcgg

SEQ ID NO: 2799 - RNA, 20 nt, synthetic construct
  source 1..20: mol_type = other RNA
cgggccccagctcgcagcca

SEQ ID NO: 2800 - RNA, 20 nt, synthetic construct
  source 1..20: mol_type = other RNA
cggggccagggtctcacacc

SEQ ID NO: 2801 - RNA, 20 nt, synthetic construct
  source 1..20: mol_type = other RNA
cggggcttggtgggcgggac

SEQ ID NO: 2802 - RNA, 20 nt, synthetic construct
  source 1..20: mol_type = other RNA
cgggtatgaacagttcgcct

SEQ ID NO: 2803 - RNA, 20 nt, synthetic construct
  source 1..20: mol_type = other RNA
cggtccaggagcgcaggtcc

SEQ ID NO: 2804 - RNA, 20 nt, synthetic construct
  source 1..20: mol_type = other RNA
cggtggacacggcggctcag

SEQ ID NO: 2805 - RNA, 20 nt, synthetic construct
  source 1..20: mol_type = other RNA
cgtaggcgaactgttcatac

SEQ ID NO: 2806 - RNA, 20 nt, synthetic construct
  source 1..20: mol_type = other RNA
cgtcgggccccagctcgcag

SEQ ID NO: 2807 - RNA, 20 nt, synthetic construct
  source 1..20: mol_type = other RNA
cgtcgtaggcgaactgttca

SEQ ID NO: 2808 - RNA, 20 nt, synthetic construct
  source 1..20: mol_type = other RNA
cgtctccttccccttctcca

SEQ ID NO: 2809 - RNA, 20 nt, synthetic construct
  source 1..20: mol_type = other RNA
cgtggagtggctccacaaat

SEQ ID NO: 2810 - RNA, 20 nt, synthetic construct
  source 1..20: mol_type = other RNA
cgtgtccaccgcggtccagg

SEQ ID NO: 2811 - RNA, 20 nt, synthetic construct
  source 1..20: mol_type = other RNA
ctaaggggcggggccagggt

SEQ ID NO: 2812 - RNA, 20 nt, synthetic construct
  source 1..20: mol_type = other RNA
ctacctggaagacacatgcg

SEQ ID NO: 2813 - RNA, 20 nt, synthetic construct
  source 1..20: mol_type = other RNA
ctacgacggcaaggattatc

SEQ ID NO: 2814 - RNA, 20 nt, synthetic construct
  source 1..20: mol_type = other RNA
ctcacaccctgcagtggatg

SEQ ID NO: 2815 - RNA, 20 nt, synthetic construct
  source 1..20: mol_type = other RNA
ctcaccctgaatgaggacct

SEQ ID NO: 2816 - RNA, 20 nt, synthetic construct
  source 1..20: mol_type = other RNA
ctcagaggcatcatttgact

SEQ ID NO: 2817 - RNA, 20 nt, synthetic construct
  source 1..20: mol_type = other RNA
ctcagatctccgagcaaaag

SEQ ID NO: 2818 - RNA, 20 nt, synthetic construct
  source 1..20: mol_type = other RNA
ctcattcagggtgagataat

SEQ ID NO: 2819 - RNA, 20 nt, synthetic construct
  source 1..20: mol_type = other RNA
ctccacaaatacctggagaa

SEQ ID NO: 2820 - RNA, 20 nt, synthetic construct
  source 1..20: mol_type = other RNA
ctccacgcatgtgtcttcca

SEQ ID NO: 2821 - RNA, 20 nt, synthetic construct
  source 1..20: mol_type = other RNA
ctccaggtatttgtggagcc

SEQ ID NO: 2822 - RNA, 20 nt, synthetic construct
  source 1..20: mol_type = other RNA
ctccgagcaaaagtcaaatg

SEQ ID NO: 2823 - RNA, 20 nt, synthetic construct
  source 1..20: mol_type = other RNA
ctccgcctcagaggcatcat

SEQ ID NO: 2824 - RNA, 20 nt, synthetic construct
  source 1..20: mol_type = other RNA
ctccgcgggtatgaacagtt

SEQ ID NO: 2825 - RNA, 20 nt, synthetic construct
  source 1..20: mol_type = other RNA
ctcctggaccgcggtggaca

SEQ ID NO: 2826 - RNA, 20 nt, synthetic construct
  source 1..20: mol_type = other RNA
ctccttccccttctccaggt

SEQ ID NO: 2827 - RNA, 20 nt, synthetic construct
  source 1..20: mol_type = other RNA
ctcgcagccatgcatccact

SEQ ID NO: 2828 - RNA, 20 nt, synthetic construct
  source 1..20: mol_type = other RNA
ctcggagatctgagccgccg

SEQ ID NO: 2829 - RNA, 20 nt, synthetic construct
  source 1..20: mol_type = other RNA
ctctctggtgctccgcctca

SEQ ID NO: 2830 - RNA, 20 nt, synthetic construct
  source 1..20: mol_type = other RNA
ctctgaggcggagcaccaga

SEQ ID NO: 2831 - RNA, 20 nt, synthetic construct
  source 1..20: mol_type = other RNA
ctctggtgctccgcctcaga

SEQ ID NO: 2832 - RNA, 20 nt, synthetic construct
  source 1..20: mol_type = other RNA
ctcttacccaggtgaagcag

SEQ ID NO: 2833 - RNA, 20 nt, synthetic construct
  source 1..20: mol_type = other RNA
ctgaatgaggacctgcgctc

SEQ ID NO: 2834 - RNA, 20 nt, synthetic construct
  source 1..20: mol_type = other RNA
ctgactaaggggcggggcca

SEQ ID NO: 2835 - RNA, 20 nt, synthetic construct
  source 1..20: mol_type = other RNA
ctgagccgccgtgtccaccg

SEQ ID NO: 2836 - RNA, 20 nt, synthetic construct
  source 1..20: mol_type = other RNA
ctgaggcggagcaccagaga

SEQ ID NO: 2837 - RNA, 20 nt, synthetic construct
  source 1..20: mol_type = other RNA
ctgcagggtgtgagaccctg

SEQ ID NO: 2838 - RNA, 20 nt, synthetic construct
  source 1..20: mol_type = other RNA
ctgcagtggatgcatggctg

SEQ ID NO: 2839 - RNA, 20 nt, synthetic construct
  source 1..20: mol_type = other RNA
ctgcgagctggggcccgacg

SEQ ID NO: 2840 - RNA, 20 nt, synthetic construct
  source 1..20: mol_type = other RNA
ctgcgctcctggaccgcggt

SEQ ID NO: 2841 - RNA, 20 nt, synthetic construct
  source 1..20: mol_type = other RNA
ctgcttcacctgggtaagag

SEQ ID NO: 2842 - RNA, 20 nt, synthetic construct
  source 1..20: mol_type = other RNA
ctggaagacacatgcgtgga

SEQ ID NO: 2843 - RNA, 20 nt, synthetic construct
  source 1..20: mol_type = other RNA
ctggaccgcggtggacacgg

SEQ ID NO: 2844 - RNA, 20 nt, synthetic construct
  source 1..20: mol_type = other RNA
ctggagaaggggaaggagac

SEQ ID NO: 2845 - RNA, 20 nt, synthetic construct
  source 1..20: mol_type = other RNA
ctggccccgccccttagtca

SEQ ID NO: 2846 - RNA, 20 nt, synthetic construct
  source 1..20: mol_type = other RNA
ctggggcccgacgggcgctt

SEQ ID NO: 2847 - RNA, 20 nt, synthetic construct
  source 1..20: mol_type = other RNA
ctgggtaagagggtccacag

SEQ ID NO: 2848 - RNA, 20 nt, synthetic construct
  source 1..20: mol_type = other RNA
ctggtgctccgcctcagagg

SEQ ID NO: 2849 - RNA, 20 nt, synthetic construct
  source 1..20: mol_type = other RNA
ctgtggaccctcttacccag

SEQ ID NO: 2850 - RNA, 20 nt, synthetic construct
  source 1..20: mol_type = other RNA
cttacccaggtgaagcagcg

SEQ ID NO: 2851 - RNA, 20 nt, synthetic construct
  source 1..20: mol_type = other RNA
cttagtcagtcccgcccacc

SEQ ID NO: 2852 - RNA, 20 nt, synthetic construct
  source 1..20: mol_type = other RNA
cttcacctgggtaagagggt

SEQ ID NO: 2853 - RNA, 20 nt, synthetic construct
  source 1..20: mol_type = other RNA
cttccaggtaggctctctgg

SEQ ID NO: 2854 - RNA, 20 nt, synthetic construct
  source 1..20: mol_type = other RNA
cttccccttctccaggtatt

SEQ ID NO: 2855 - RNA, 20 nt, synthetic construct
  source 1..20: mol_type = other RNA
cttcctccgcgggtatgaac

SEQ ID NO: 2856 - RNA, 20 nt, synthetic construct
  source 1..20: mol_type = other RNA
cttctccaggtatttgtgga

SEQ ID NO: 2857 - RNA, 20 nt, synthetic construct
  source 1..20: mol_type = other RNA
cttgccgtcgtaggcgaact

SEQ ID NO: 2858 - RNA, 20 nt, synthetic construct
  source 1..20: mol_type = other RNA
cttggtgggcgggactgact

SEQ ID NO: 2859 - RNA, 20 nt, synthetic construct
  source 1..20: mol_type = other RNA
cttttgctcggagatctgag

SEQ ID NO: 2860 - RNA, 20 nt, synthetic construct
  source 1..20: mol_type = other RNA
gaacagttcgcctacgacgg

SEQ ID NO: 2861 - RNA, 20 nt, synthetic construct
  source 1..20: mol_type = other RNA
gaactgttcatacccgcgga

SEQ ID NO: 2862 - RNA, 20 nt, synthetic construct
  source 1..20: mol_type = other RNA
gaagacacatgcgtggagtg

SEQ ID NO: 2863 - RNA, 20 nt, synthetic construct
  source 1..20: mol_type = other RNA
gaagcagcgtctccttcccc

SEQ ID NO: 2864 - RNA, 20 nt, synthetic construct
  source 1..20: mol_type = other RNA
gaagcgcccgtcgggcccca

SEQ ID NO: 2865 - RNA, 20 nt, synthetic construct
  source 1..20: mol_type = other RNA
gaaggagacgctgcttcacc

SEQ ID NO: 2866 - RNA, 20 nt, synthetic construct
  source 1..20: mol_type = other RNA
gaaggagatgggagagtagc

SEQ ID NO: 2867 - RNA, 20 nt, synthetic construct
  source 1..20: mol_type = other RNA
gaaggggaaggagacgctgc

SEQ ID NO: 2868 - RNA, 20 nt, synthetic construct
  source 1..20: mol_type = other RNA
gaatgaggacctgcgctcct

SEQ ID NO: 2869 - RNA, 20 nt, synthetic construct
  source 1..20: mol_type = other RNA
gacacatgcgtggagtggct

SEQ ID NO: 2870 - RNA, 20 nt, synthetic construct
  source 1..20: mol_type = other RNA
gacacggcggctcagatctc

SEQ ID NO: 2871 - RNA, 20 nt, synthetic construct
  source 1..20: mol_type = other RNA
gaccctcttacccaggtgaa

SEQ ID NO: 2872 - RNA, 20 nt, synthetic construct
  source 1..20: mol_type = other RNA
gaccctggccccgcccctta

SEQ ID NO: 2873 - RNA, 20 nt, synthetic construct
  source 1..20: mol_type = other RNA
gaccgcggtggacacggcgg

SEQ ID NO: 2874 - RNA, 20 nt, synthetic construct
  source 1..20: mol_type = other RNA
gacctgcgctcctggaccgc

SEQ ID NO: 2875 - RNA, 20 nt, synthetic construct
  source 1..20: mol_type = other RNA
gacgctgcttcacctgggta

SEQ ID NO: 2876 - RNA, 20 nt, synthetic construct
  source 1..20: mol_type = other RNA
gacggcaaggattatctcac

SEQ ID NO: 2877 - RNA, 20 nt, synthetic construct
  source 1..20: mol_type = other RNA
gacgggggcggggcttggtg

SEQ ID NO: 2878 - RNA, 20 nt, synthetic construct
  source 1..20: mol_type = other RNA
gactaaggggcggggccagg

SEQ ID NO: 2879 - RNA, 20 nt, synthetic construct
  source 1..20: mol_type = other RNA
gactgactaaggggcggggc

SEQ ID NO: 2880 - RNA, 20 nt, synthetic construct
  source 1..20: mol_type = other RNA
gacttttgctcggagatctg

SEQ ID NO: 2881 - RNA, 20 nt, synthetic construct
  source 1..20: mol_type = other RNA
gagaaggggaaggagacgct

SEQ ID NO: 2882 - RNA, 20 nt, synthetic construct
  source 1..20: mol_type = other RNA
gagaccctggccccgcccct

SEQ ID NO: 2883 - RNA, 20 nt, synthetic construct
  source 1..20: mol_type = other RNA
gagacgctgcttcacctggg

SEQ ID NO: 2884 - RNA, 20 nt, synthetic construct
  source 1..20: mol_type = other RNA
gagagcctacctggaagaca

SEQ ID NO: 2885 - RNA, 20 nt, synthetic construct
  source 1..20: mol_type = other RNA
gagagtagccctgtggaccc

SEQ ID NO: 2886 - RNA, 20 nt, synthetic construct
  source 1..20: mol_type = other RNA
gagataatccttgccgtcgt

SEQ ID NO: 2887 - RNA, 20 nt, synthetic construct
  source 1..20: mol_type = other RNA
gagatctgagccgccgtgtc

SEQ ID NO: 2888 - RNA, 20 nt, synthetic construct
  source 1..20: mol_type = other RNA
gagatgggagagtagccctg

SEQ ID NO: 2889 - RNA, 20 nt, synthetic construct
  source 1..20: mol_type = other RNA
gagcaaaagtcaaatgatgc

SEQ ID NO: 2890 - RNA, 20 nt, synthetic construct
  source 1..20: mol_type = other RNA
gagcaccagagagcctacct

SEQ ID NO: 2891 - RNA, 20 nt, synthetic construct
  source 1..20: mol_type = other RNA
gagccactccacgcatgtgt

SEQ ID NO: 2892 - RNA, 20 nt, synthetic construct
  source 1..20: mol_type = other RNA
gagccgccgtgtccaccgcg

SEQ ID NO: 2893 - RNA, 20 nt, synthetic construct
  source 1..20: mol_type = other RNA
gagcctacctggaagacaca

SEQ ID NO: 2894 - RNA, 20 nt, synthetic construct
  source 1..20: mol_type = other RNA
gagcgcaggtcctcattcag

SEQ ID NO: 2895 - RNA, 20 nt, synthetic construct
  source 1..20: mol_type = other RNA
gaggaagcgcccgtcgggcc

SEQ ID NO: 2896 - RNA, 20 nt, synthetic construct
  source 1..20: mol_type = other RNA
gaggacctgcgctcctggac

SEQ ID NO: 2897 - RNA, 20 nt, synthetic construct
  source 1..20: mol_type = other RNA
gaggcatcatttgacttttg

SEQ ID NO: 2898 - RNA, 20 nt, synthetic construct
  source 1..20: mol_type = other RNA
gaggcggagcaccagagagc

SEQ ID NO: 2899 - RNA, 20 nt, synthetic construct
  source 1..20: mol_type = other RNA
gagggtccacagggctactc

SEQ ID NO: 2900 - RNA, 20 nt, synthetic construct
  source 1..20: mol_type = other RNA
gagtagccctgtggaccctc

SEQ ID NO: 2901 - RNA, 20 nt, synthetic construct
  source 1..20: mol_type = other RNA
gagtggctccacaaatacct

SEQ ID NO: 2902 - RNA, 20 nt, synthetic construct
  source 1..20: mol_type = other RNA
gataatccttgccgtcgtag

SEQ ID NO: 2903 - RNA, 20 nt, synthetic construct
  source 1..20: mol_type = other RNA
gatctccgagcaaaagtcaa

SEQ ID NO: 2904 - RNA, 20 nt, synthetic construct
  source 1..20: mol_type = other RNA
gatctgagccgccgtgtcca

SEQ ID NO: 2905 - RNA, 20 nt, synthetic construct
  source 1..20: mol_type = other RNA
gatgcatggctgcgagctgg

SEQ ID NO: 2906 - RNA, 20 nt, synthetic construct
  source 1..20: mol_type = other RNA
gatgcctctgaggcggagca

SEQ ID NO: 2907 - RNA, 20 nt, synthetic construct
  source 1..20: mol_type = other RNA
gatgggagagtagccctgtg

SEQ ID NO: 2908 - RNA, 20 nt, synthetic construct
  source 1..20: mol_type = other RNA
gattatctcaccctgaatga

SEQ ID NO: 2909 - RNA, 20 nt, synthetic construct
  source 1..20: mol_type = other RNA
gcaaaagtcaaatgatgcct

SEQ ID NO: 2910 - RNA, 20 nt, synthetic construct
  source 1..20: mol_type = other RNA
gcaaggattatctcaccctg

SEQ ID NO: 2911 - RNA, 20 nt, synthetic construct
  source 1..20: mol_type = other RNA
gcaccagagagcctacctgg

SEQ ID NO: 2912 - RNA, 20 nt, synthetic construct
  source 1..20: mol_type = other RNA
gcagccatgcatccactgca

SEQ ID NO: 2913 - RNA, 20 nt, synthetic construct
  source 1..20: mol_type = other RNA
gcagcgtctccttccccttc

SEQ ID NO: 2914 - RNA, 20 nt, synthetic construct
  source 1..20: mol_type = other RNA
gcagggtgtgagaccctggc

SEQ ID NO: 2915 - RNA, 20 nt, synthetic construct
  source 1..20: mol_type = other RNA
gcaggtcctcattcagggtg

SEQ ID NO: 2916 - RNA, 20 nt, synthetic construct
  source 1..20: mol_type = other RNA
gcagtggatgcatggctgcg

SEQ ID NO: 2917 - RNA, 20 nt, synthetic construct
  source 1..20: mol_type = other RNA
gcatcatttgacttttgctc

SEQ ID NO: 2918 - RNA, 20 nt, synthetic construct
  source 1..20: mol_type = other RNA
gcatccactgcagggtgtga

SEQ ID NO: 2919 - RNA, 20 nt, synthetic construct
  source 1..20: mol_type = other RNA
gcatggctgcgagctggggc

SEQ ID NO: 2920 - RNA, 20 nt, synthetic construct
  source 1..20: mol_type = other RNA
gcatgtgtcttccaggtagg

SEQ ID NO: 2921 - RNA, 20 nt, synthetic construct
  source 1..20: mol_type = other RNA
gccactccacgcatgtgtct

SEQ ID NO: 2922 - RNA, 20 nt, synthetic construct
  source 1..20: mol_type = other RNA
gccagggtctcacaccctgc

SEQ ID NO: 2923 - RNA, 20 nt, synthetic construct
  source 1..20: mol_type = other RNA
gccatgcatccactgcaggg

SEQ ID NO: 2924 - RNA, 20 nt, synthetic construct
  source 1..20: mol_type = other RNA
gcccacagggtggtggcgac

SEQ ID NO: 2925 - RNA, 20 nt, synthetic construct
  source 1..20: mol_type = other RNA
gccccagctcgcagccatgc

SEQ ID NO: 2926 - RNA, 20 nt, synthetic construct
  source 1..20: mol_type = other RNA
gcccccgtcgccaccaccct

SEQ ID NO: 2927 - RNA, 20 nt, synthetic construct
  source 1..20: mol_type = other RNA
gccccgccccttagtcagtc

SEQ ID NO: 2928 - RNA, 20 nt, synthetic construct
  source 1..20: mol_type = other RNA
gccccttagtcagtcccgcc

SEQ ID NO: 2929 - RNA, 20 nt, synthetic construct
  source 1..20: mol_type = other RNA
gccctgtggaccctcttacc

SEQ ID NO: 2930 - RNA, 20 nt, synthetic construct
  source 1..20: mol_type = other RNA
gccgccgtgtccaccgcggt

SEQ ID NO: 2931 - RNA, 20 nt, synthetic construct
  source 1..20: mol_type = other RNA
gccgtcgtaggcgaactgtt

SEQ ID NO: 2932 - RNA, 20 nt, synthetic construct
  source 1..20: mol_type = other RNA
gccgtgtccaccgcggtcca

SEQ ID NO: 2933 - RNA, 20 nt, synthetic construct
  source 1..20: mol_type = other RNA
gcctacctggaagacacatg

SEQ ID NO: 2934 - RNA, 20 nt, synthetic construct
  source 1..20: mol_type = other RNA
gcctacgacggcaaggatta

SEQ ID NO: 2935 - RNA, 20 nt, synthetic construct
  source 1..20: mol_type = other RNA
gcctcagaggcatcatttga

SEQ ID NO: 2936 - RNA, 20 nt, synthetic construct
  source 1..20: mol_type = other RNA
gcctctgaggcggagcacca

SEQ ID NO: 2937 - RNA, 20 nt, synthetic construct
  source 1..20: mol_type = other RNA
gcgaactgttcatacccgcg

SEQ ID NO: 2938 - RNA, 20 nt, synthetic construct
  source 1..20: mol_type = other RNA
gcgcaggtcctcattcaggg

SEQ ID NO: 2939 - RNA, 20 nt, synthetic construct
  source 1..20: mol_type = other RNA
gcgctcctggaccgcggtgg

SEQ ID NO: 2940 - RNA, 20 nt, synthetic construct
  source 1..20: mol_type = other RNA
gcgcttcctccgcgggtatg

SEQ ID NO: 2941 - RNA, 20 nt, synthetic construct
  source 1..20: mol_type = other RNA
gcggagcaccagagagccta

SEQ ID NO: 2942 - RNA, 20 nt, synthetic construct
  source 1..20: mol_type = other RNA
gcggaggaagcgcccgtcgg

SEQ ID NO: 2943 - RNA, 20 nt, synthetic construct
  source 1..20: mol_type = other RNA
gcggctcagatctccgagca

SEQ ID NO: 2944 - RNA, 20 nt, synthetic construct
  source 1..20: mol_type = other RNA
gcgggactgactaaggggcg

SEQ ID NO: 2945 - RNA, 20 nt, synthetic construct
  source 1..20: mol_type = other RNA
gcggggccagggtctcacac

SEQ ID NO: 2946 - RNA, 20 nt, synthetic construct
  source 1..20: mol_type = other RNA
gcggggcttggtgggcggga

SEQ ID NO: 2947 - RNA, 20 nt, synthetic construct
  source 1..20: mol_type = other RNA
gcgggtatgaacagttcgcc

SEQ ID NO: 2948 - RNA, 20 nt, synthetic construct
  source 1..20: mol_type = other RNA
gcggtccaggagcgcaggtc

SEQ ID NO: 2949 - RNA, 20 nt, synthetic construct
  source 1..20: mol_type = other RNA
gcggtggacacggcggctca

SEQ ID NO: 2950 - RNA, 20 nt, synthetic construct
  source 1..20: mol_type = other RNA
gcgtctccttccccttctcc

SEQ ID NO: 2951 - RNA, 20 nt, synthetic construct
  source 1..20: mol_type = other RNA
gcgtggagtggctccacaaa

SEQ ID NO: 2952 - RNA, 20 nt, synthetic construct
  source 1..20: mol_type = other RNA
gctcagatctccgagcaaaa

SEQ ID NO: 2953 - RNA, 20 nt, synthetic construct
  source 1..20: mol_type = other RNA
gctccacaaatacctggaga

SEQ ID NO: 2954 - RNA, 20 nt, synthetic construct
  source 1..20: mol_type = other RNA
gctccgcctcagaggcatca

SEQ ID NO: 2955 - RNA, 20 nt, synthetic construct
  source 1..20: mol_type = other RNA
gctcctggaccgcggtggac

SEQ ID NO: 2956 - RNA, 20 nt, synthetic construct
  source 1..20: mol_type = other RNA
gctcgcagccatgcatccac

SEQ ID NO: 2957 - RNA, 20 nt, synthetic construct
  source 1..20: mol_type = other RNA
gctcggagatctgagccgcc

SEQ ID NO: 2958 - RNA, 20 nt, synthetic construct
  source 1..20: mol_type = other RNA
gctctctggtgctccgcctc

SEQ ID NO: 2959 - RNA, 20 nt, synthetic construct
  source 1..20: mol_type = other RNA
gctgcgagctggggcccgac

SEQ ID NO: 2960 - RNA, 20 nt, synthetic construct
  source 1..20: mol_type = other RNA
gctgcttcacctgggtaaga

SEQ ID NO: 2961 - RNA, 20 nt, synthetic construct
  source 1..20: mol_type = other RNA
gcttcacctgggtaagaggg

SEQ ID NO: 2962 - RNA, 20 nt, synthetic construct
  source 1..20: mol_type = other RNA
gcttcctccgcgggtatgaa

SEQ ID NO: 2963 - RNA, 20 nt, synthetic construct
  source 1..20: mol_type = other RNA
gcttggtgggcgggactgac

SEQ ID NO: 2964 - RNA, 20 nt, synthetic construct
  source 1..20: mol_type = other RNA
ggaagacacatgcgtggagt

SEQ ID NO: 2965 - RNA, 20 nt, synthetic construct
  source 1..20: mol_type = other RNA
ggaaggagacgctgcttcac

SEQ ID NO: 2966 - RNA, 20 nt, synthetic construct
  source 1..20: mol_type = other RNA
ggacacggcggctcagatct

SEQ ID NO: 2967 - RNA, 20 nt, synthetic construct
  source 1..20: mol_type = other RNA
ggaccctcttacccaggtga

SEQ ID NO: 2968 - RNA, 20 nt, synthetic construct
  source 1..20: mol_type = other RNA
ggaccgcggtggacacggcg

SEQ ID NO: 2969 - RNA, 20 nt, synthetic construct
  source 1..20: mol_type = other RNA
ggacctgcgctcctggaccg

SEQ ID NO: 2970 - RNA, 20 nt, synthetic construct
  source 1..20: mol_type = other RNA
ggactgactaaggggcgggg

SEQ ID NO: 2971 - RNA, 20 nt, synthetic construct
  source 1..20: mol_type = other RNA
ggagaaggggaaggagacgc

SEQ ID NO: 2972 - RNA, 20 nt, synthetic construct
  source 1..20: mol_type = other RNA
ggagacgctgcttcacctgg

SEQ ID NO: 2973 - RNA, 20 nt, synthetic construct
  source 1..20: mol_type = other RNA
ggagagtagccctgtggacc

SEQ ID NO: 2974 - RNA, 20 nt, synthetic construct
  source 1..20: mol_type = other RNA
ggagatctgagccgccgtgt

SEQ ID NO: 2975 - RNA, 20 nt, synthetic construct
  source 1..20: mol_type = other RNA
ggagatgggagagtagccct

SEQ ID NO: 2976 - RNA, 20 nt, synthetic construct
  source 1..20: mol_type = other RNA
ggagcaccagagagcctacc

SEQ ID NO: 2977 - RNA, 20 nt, synthetic construct
  source 1..20: mol_type = other RNA
ggagccactccacgcatgtg

SEQ ID NO: 2978 - RNA, 20 nt, synthetic construct
  source 1..20: mol_type = other RNA
ggagcgcaggtcctcattca

SEQ ID NO: 2979 - RNA, 20 nt, synthetic construct
  source 1..20: mol_type = other RNA
ggaggaagcgcccgtcgggc

SEQ ID NO: 2980 - RNA, 20 nt, synthetic construct
  source 1..20: mol_type = other RNA
ggagtggctccacaaatacc

SEQ ID NO: 2981 - RNA, 20 nt, synthetic construct
  source 1..20: mol_type = other RNA
ggatgcatggctgcgagctg

SEQ ID NO: 2982 - RNA, 20 nt, synthetic construct
  source 1..20: mol_type = other RNA
ggattatctcaccctgaatg

SEQ ID NO: 2983 - RNA, 20 nt, synthetic construct
  source 1..20: mol_type = other RNA
ggcaaggattatctcaccct

SEQ ID NO: 2984 - RNA, 20 nt, synthetic construct
  source 1..20: mol_type = other RNA
ggcatcatttgacttttgct

SEQ ID NO: 2985 - RNA, 20 nt, synthetic construct
  source 1..20: mol_type = other RNA
ggccagggtctcacaccctg

SEQ ID NO: 2986 - RNA, 20 nt, synthetic construct
  source 1..20: mol_type = other RNA
ggccccagctcgcagccatg

SEQ ID NO: 2987 - RNA, 20 nt, synthetic construct
  source 1..20: mol_type = other RNA
ggccccgccccttagtcagt

SEQ ID NO: 2988 - RNA, 20 nt, synthetic construct
  source 1..20: mol_type = other RNA
ggcgaactgttcatacccgc

SEQ ID NO: 2989 - RNA, 20 nt, synthetic construct
  source 1..20: mol_type = other RNA
ggcgcttcctccgcgggtat

SEQ ID NO: 2990 - RNA, 20 nt, synthetic construct
  source 1..20: mol_type = other RNA
ggcggagcaccagagagcct

SEQ ID NO: 2991 - RNA, 20 nt, synthetic construct
  source 1..20: mol_type = other RNA
ggcggctcagatctccgagc

SEQ ID NO: 2992 - RNA, 20 nt, synthetic construct
  source 1..20: mol_type = other RNA
ggcgggactgactaaggggc

SEQ ID NO: 2993 - RNA, 20 nt, synthetic construct
  source 1..20: mol_type = other RNA
ggcggggccagggtctcaca

SEQ ID NO: 2994 - RNA, 20 nt, synthetic construct
  source 1..20: mol_type = other RNA
ggctcagatctccgagcaaa

SEQ ID NO: 2995 - RNA, 20 nt, synthetic construct
  source 1..20: mol_type = other RNA
ggctccacaaatacctggag

SEQ ID NO: 2996 - RNA, 20 nt, synthetic construct
  source 1..20: mol_type = other RNA
ggctctctggtgctccgcct

SEQ ID NO: 2997 - RNA, 20 nt, synthetic construct
  source 1..20: mol_type = other RNA
ggctgcgagctggggcccga

SEQ ID NO: 2998 - RNA, 20 nt, synthetic construct
  source 1..20: mol_type = other RNA
ggcttggtgggcgggactga

SEQ ID NO: 2999 - RNA, 20 nt, synthetic construct
  source 1..20: mol_type = other RNA
gggaaggagacgctgcttca

SEQ ID NO: 3000 - RNA, 20 nt, synthetic construct
  source 1..20: mol_type = other RNA
gggactgactaaggggcggg

SEQ ID NO: 3001 - RNA, 20 nt, synthetic construct
  source 1..20: mol_type = other RNA
gggagagtagccctgtggac

SEQ ID NO: 3002 - RNA, 20 nt, synthetic construct
  source 1..20: mol_type = other RNA
gggccagggtctcacaccct

SEQ ID NO: 3003 - RNA, 20 nt, synthetic construct
  source 1..20: mol_type = other RNA
gggccccagctcgcagccat

SEQ ID NO: 3004 - RNA, 20 nt, synthetic construct
  source 1..20: mol_type = other RNA
gggcgcttcctccgcgggta

SEQ ID NO: 3005 - RNA, 20 nt, synthetic construct
  source 1..20: mol_type = other RNA
gggcgggactgactaagggg

SEQ ID NO: 3006 - RNA, 20 nt, synthetic construct
  source 1..20: mol_type = other RNA
gggcggggccagggtctcac

SEQ ID NO: 3007 - RNA, 20 nt, synthetic construct
  source 1..20: mol_type = other RNA
gggcttggtgggcgggactg

SEQ ID NO: 3008 - RNA, 20 nt, synthetic construct
  source 1..20: mol_type = other RNA
ggggaaggagacgctgcttc

SEQ ID NO: 3009 - RNA, 20 nt, synthetic construct
  source 1..20: mol_type = other RNA
ggggccagggtctcacaccc

SEQ ID NO: 3010 - RNA, 20 nt, synthetic construct
  source 1..20: mol_type = other RNA
ggggcggggccagggtctca

SEQ ID NO: 3011 - RNA, 20 nt, synthetic construct
  source 1..20: mol_type = other RNA
ggggcttggtgggcgggact

SEQ ID NO: 3012 - RNA, 20 nt, synthetic construct
  source 1..20: mol_type = other RNA
gggtaagagggtccacaggg

SEQ ID NO: 3013 - RNA, 20 nt, synthetic construct
  source 1..20: mol_type = other RNA
gggtatgaacagttcgccta

SEQ ID NO: 3014 - RNA, 20 nt, synthetic construct
  source 1..20: mol_type = other RNA
gggtccacagggctactctc

SEQ ID NO: 3015 - RNA, 20 nt, synthetic construct
  source 1..20: mol_type = other RNA
gggtctcacaccctgcagtg

SEQ ID NO: 3016 - RNA, 20 nt, synthetic construct
  source 1..20: mol_type = other RNA
gggtgagataatccttgccg

SEQ ID NO: 3017 - RNA, 20 nt, synthetic construct
  source 1..20: mol_type = other RNA
gggtgtgagaccctggcccc

SEQ ID NO: 3018 - RNA, 20 nt, synthetic construct
  source 1..20: mol_type = other RNA
ggtaagagggtccacagggc

SEQ ID NO: 3019 - RNA, 20 nt, synthetic construct
  source 1..20: mol_type = other RNA
ggtaggctctctggtgctcc

SEQ ID NO: 3020 - RNA, 20 nt, synthetic construct
  source 1..20: mol_type = other RNA
ggtatgaacagttcgcctac

SEQ ID NO: 3021 - RNA, 20 nt, synthetic construct
  source 1..20: mol_type = other RNA
ggtatttgtggagccactcc

SEQ ID NO: 3022 - RNA, 20 nt, synthetic construct
  source 1..20: mol_type = other RNA
ggtccacagggctactctcc

SEQ ID NO: 3023 - RNA, 20 nt, synthetic construct
  source 1..20: mol_type = other RNA
ggtccaggagcgcaggtcct

SEQ ID NO: 3024 - RNA, 20 nt, synthetic construct
  source 1..20: mol_type = other RNA
ggtcctcattcagggtgaga

SEQ ID NO: 3025 - RNA, 20 nt, synthetic construct
  source 1..20: mol_type = other RNA
ggtctcacaccctgcagtgg

SEQ ID NO: 3026 - RNA, 20 nt, synthetic construct
  source 1..20: mol_type = other RNA
ggtgaagcagcgtctccttc

SEQ ID NO: 3027 - RNA, 20 nt, synthetic construct
  source 1..20: mol_type = other RNA
ggtgagataatccttgccgt

SEQ ID NO: 3028 - RNA, 20 nt, synthetic construct
  source 1..20: mol_type = other RNA
ggtgctccgcctcagaggca

SEQ ID NO: 3029 - RNA, 20 nt, synthetic construct
  source 1..20: mol_type = other RNA
ggtggacacggcggctcaga

SEQ ID NO: 3030 - RNA, 20 nt, synthetic construct
  source 1..20: mol_type = other RNA
ggtgggcgggactgactaag

SEQ ID NO: 3031 - RNA, 20 nt, synthetic construct
  source 1..20: mol_type = other RNA
ggtgtgagaccctggccccg

SEQ ID NO: 3032 - RNA, 20 nt, synthetic construct
  source 1..20: mol_type = other RNA
gtaagagggtccacagggct

SEQ ID NO: 3033 - RNA, 20 nt, synthetic construct
  source 1..20: mol_type = other RNA
gtagccctgtggaccctctt

SEQ ID NO: 3034 - RNA, 20 nt, synthetic construct
  source 1..20: mol_type = other RNA
gtaggcgaactgttcatacc

SEQ ID NO: 3035 - RNA, 20 nt, synthetic construct
  source 1..20: mol_type = other RNA
gtaggctctctggtgctccg

SEQ ID NO: 3036 - RNA, 20 nt, synthetic construct
  source 1..20: mol_type = other RNA
gtatgaacagttcgcctacg

SEQ ID NO: 3037 - RNA, 20 nt, synthetic construct
  source 1..20: mol_type = other RNA
gtatttgtggagccactcca

SEQ ID NO: 3038 - RNA, 20 nt, synthetic construct
  source 1..20: mol_type = other RNA
gtcaaatgatgcctctgagg

SEQ ID NO: 3039 - RNA, 20 nt, synthetic construct
  source 1..20: mol_type = other RNA
gtcagtcccgcccaccaagc

SEQ ID NO: 3040 - RNA, 20 nt, synthetic construct
  source 1..20: mol_type = other RNA
gtccacagggctactctccc

SEQ ID NO: 3041 - RNA, 20 nt, synthetic construct
  source 1..20: mol_type = other RNA
gtccaccgcggtccaggagc

SEQ ID NO: 3042 - RNA, 20 nt, synthetic construct
  source 1..20: mol_type = other RNA
gtccaggagcgcaggtcctc

SEQ ID NO: 3043 - RNA, 20 nt, synthetic construct
  source 1..20: mol_type = other RNA
gtcccgcccaccaagccccg

SEQ ID NO: 3044 - RNA, 20 nt, synthetic construct
  source 1..20: mol_type = other RNA
gtcctcattcagggtgagat

SEQ ID NO: 3045 - RNA, 20 nt, synthetic construct
  source 1..20: mol_type = other RNA
gtcgggccccagctcgcagc

SEQ ID NO: 3046 - RNA, 20 nt, synthetic construct
  source 1..20: mol_type = other RNA
gtcgtaggcgaactgttcat

SEQ ID NO: 3047 - RNA, 20 nt, synthetic construct
  source 1..20: mol_type = other RNA
gtctcacaccctgcagtgga

SEQ ID NO: 3048 - RNA, 20 nt, synthetic construct
  source 1..20: mol_type = other RNA
gtctccttccccttctccag

SEQ ID NO: 3049 - RNA, 20 nt, synthetic construct
  source 1..20: mol_type = other RNA
gtcttccaggtaggctctct

SEQ ID NO: 3050 - RNA, 20 nt, synthetic construct
  source 1..20: mol_type = other RNA
gtgaagcagcgtctccttcc

SEQ ID NO: 3051 - RNA, 20 nt, synthetic construct
  source 1..20: mol_type = other RNA
gtgagaccctggccccgccc

SEQ ID NO: 3052 - RNA, 20 nt, synthetic construct
  source 1..20: mol_type = other RNA
gtgagataatccttgccgtc

SEQ ID NO: 3053 - RNA, 20 nt, synthetic construct
  source 1..20: mol_type = other RNA
gtgctccgcctcagaggcat

SEQ ID NO: 3054 - RNA, 20 nt, synthetic construct
  source 1..20: mol_type = other RNA
gtggacacggcggctcagat

SEQ ID NO: 3055 - RNA, 20 nt, synthetic construct
  source 1..20: mol_type = other RNA
gtggaccctcttacccaggt

SEQ ID NO: 3056 - RNA, 20 nt, synthetic construct
  source 1..20: mol_type = other RNA
gtggagccactccacgcatg

SEQ ID NO: 3057 - RNA, 20 nt, synthetic construct
  source 1..20: mol_type = other RNA
gtggagtggctccacaaata

SEQ ID NO: 3058 - RNA, 20 nt, synthetic construct
  source 1..20: mol_type = other RNA
gtggatgcatggctgcgagc

SEQ ID NO: 3059 - RNA, 20 nt, synthetic construct
  source 1..20: mol_type = other RNA
gtggctccacaaatacctgg

SEQ ID NO: 3060 - RNA, 20 nt, synthetic construct
  source 1..20: mol_type = other RNA
gtgggcgggactgactaagg

SEQ ID NO: 3061 - RNA, 20 nt, synthetic construct
  source 1..20: mol_type = other RNA
gtgtccaccgcggtccagga

SEQ ID NO: 3062 - RNA, 20 nt, synthetic construct
  source 1..20: mol_type = other RNA
gtgtcttccaggtaggctct

SEQ ID NO: 3063 - RNA, 20 nt, synthetic construct
  source 1..20: mol_type = other RNA
gtgtgagaccctggccccgc

SEQ ID NO: 3064 - RNA, 20 nt, synthetic construct
  source 1..20: mol_type = other RNA
gttcgcctacgacggcaagg

SEQ ID NO: 3065 - RNA, 20 nt, synthetic construct
  source 1..20: mol_type = other RNA
taagagggtccacagggcta

SEQ ID NO: 3066 - RNA, 20 nt, synthetic construct
  source 1..20: mol_type = other RNA
taaggggcggggccagggtc

SEQ ID NO: 3067 - RNA, 20 nt, synthetic construct
  source 1..20: mol_type = other RNA
taatccttgccgtcgtaggc

SEQ ID NO: 3068 - RNA, 20 nt, synthetic construct
  source 1..20: mol_type = other RNA
tacccaggtgaagcagcgtc

SEQ ID NO: 3069 - RNA, 20 nt, synthetic construct
  source 1..20: mol_type = other RNA
tacctggaagacacatgcgt

SEQ ID NO: 3070 - RNA, 20 nt, synthetic construct
  source 1..20: mol_type = other RNA
tacctggagaaggggaagga

SEQ ID NO: 3071 - RNA, 20 nt, synthetic construct
  source 1..20: mol_type = other RNA
tacgacggcaaggattatct

SEQ ID NO: 3072 - RNA, 20 nt, synthetic construct
  source 1..20: mol_type = other RNA
tagccctgtggaccctctta

SEQ ID NO: 3073 - RNA, 20 nt, synthetic construct
  source 1..20: mol_type = other RNA
taggcgaactgttcataccc

SEQ ID NO: 3074 - RNA, 20 nt, synthetic construct
  source 1..20: mol_type = other RNA
taggctctctggtgctccgc

SEQ ID NO: 3075 - RNA, 20 nt, synthetic construct
  source 1..20: mol_type = other RNA
tagtcagtcccgcccaccaa

SEQ ID NO: 3076 - RNA, 20 nt, synthetic construct
  source 1..20: mol_type = other RNA
tatctcaccctgaatgagga

SEQ ID NO: 3077 - RNA, 20 nt, synthetic construct
  source 1..20: mol_type = other RNA
tatgaacagttcgcctacga

SEQ ID NO: 3078 - RNA, 20 nt, synthetic construct
  source 1..20: mol_type = other RNA
tatttgtggagccactccac

SEQ ID NO: 3079 - RNA, 20 nt, synthetic construct
  source 1..20: mol_type = other RNA
tcaaatgatgcctctgaggc

SEQ ID NO: 3080 - RNA, 20 nt, synthetic construct
  source 1..20: mol_type = other RNA
tcacaccctgcagtggatgc

SEQ ID NO: 3081 - RNA, 20 nt, synthetic construct
  source 1..20: mol_type = other RNA
tcaccctgaatgaggacctg

SEQ ID NO: 3082 - RNA, 20 nt, synthetic construct
  source 1..20: mol_type = other RNA
tcacctgggtaagagggtcc

SEQ ID NO: 3083 - RNA, 20 nt, synthetic construct
  source 1..20: mol_type = other RNA
tcagaggcatcatttgactt

SEQ ID NO: 3084 - RNA, 20 nt, synthetic construct
  source 1..20: mol_type = other RNA
tcagatctccgagcaaaagt

SEQ ID NO: 3085 - RNA, 20 nt, synthetic construct
  source 1..20: mol_type = other RNA
tcagggtgagataatccttg

SEQ ID NO: 3086 - RNA, 20 nt, synthetic construct
  source 1..20: mol_type = other RNA
tcagtcccgcccaccaagcc

SEQ ID NO: 3087 - RNA, 20 nt, synthetic construct
  source 1..20: mol_type = other RNA
tcattcagggtgagataatc

SEQ ID NO: 3088 - RNA, 20 nt, synthetic construct
  source 1..20: mol_type = other RNA
tcatttgacttttgctcgga

SEQ ID NO: 3089 - RNA, 20 nt, synthetic construct
  source 1..20: mol_type = other RNA
tccacaaatacctggagaag

SEQ ID NO: 3090 - RNA, 20 nt, synthetic construct
  source 1..20: mol_type = other RNA
tccacagggctactctccca

SEQ ID NO: 3091 - RNA, 20 nt, synthetic construct
  source 1..20: mol_type = other RNA
tccaccgcggtccaggagcg

SEQ ID NO: 3092 - RNA, 20 nt, synthetic construct
  source 1..20: mol_type = other RNA
tccacgcatgtgtcttccag

SEQ ID NO: 3093 - RNA, 20 nt, synthetic construct
  source 1..20: mol_type = other RNA
tccactgcagggtgtgagac

SEQ ID NO: 3094 - RNA, 20 nt, synthetic construct
  source 1..20: mol_type = other RNA
tccaggagcgcaggtcctca

SEQ ID NO: 3095 - RNA, 20 nt, synthetic construct
  source 1..20: mol_type = other RNA
tccaggtaggctctctggtg

SEQ ID NO: 3096 - RNA, 20 nt, synthetic construct
  source 1..20: mol_type = other RNA
tccaggtatttgtggagcca

SEQ ID NO: 3097 - RNA, 20 nt, synthetic construct
  source 1..20: mol_type = other RNA
tccccttctccaggtatttg

SEQ ID NO: 3098 - RNA, 20 nt, synthetic construct
  source 1..20: mol_type = other RNA
tcccgcccaccaagccccgc

SEQ ID NO: 3099 - RNA, 20 nt, synthetic construct
  source 1..20: mol_type = other RNA
tccgagcaaaagtcaaatga

SEQ ID NO: 3100 - RNA, 20 nt, synthetic construct
  source 1..20: mol_type = other RNA
tccgcctcagaggcatcatt

SEQ ID NO: 3101 - RNA, 20 nt, synthetic construct
  source 1..20: mol_type = other RNA
tccgcgggtatgaacagttc

SEQ ID NO: 3102 - RNA, 20 nt, synthetic construct
  source 1..20: mol_type = other RNA
tcctcattcagggtgagata

SEQ ID NO: 3103 - RNA, 20 nt, synthetic construct
  source 1..20: mol_type = other RNA
tcctccgcgggtatgaacag

SEQ ID NO: 3104 - RNA, 20 nt, synthetic construct
  source 1..20: mol_type = other RNA
tcctggaccgcggtggacac

SEQ ID NO: 3105 - RNA, 20 nt, synthetic construct
  source 1..20: mol_type = other RNA
tccttccccttctccaggta

SEQ ID NO: 3106 - RNA, 20 nt, synthetic construct
  source 1..20: mol_type = other RNA
tccttgccgtcgtaggcgaa

SEQ ID NO: 3107 - RNA, 20 nt, synthetic construct
  source 1..20: mol_type = other RNA
tcgcagccatgcatccactg

SEQ ID NO: 3108 - RNA, 20 nt, synthetic construct
  source 1..20: mol_type = other RNA
tcgcctacgacggcaaggat

SEQ ID NO: 3109 - RNA, 20 nt, synthetic construct
  source 1..20: mol_type = other RNA
tcggagatctgagccgccgt

SEQ ID NO: 3110 - RNA, 20 nt, synthetic construct
  source 1..20: mol_type = other RNA
tcgggccccagctcgcagcc

SEQ ID NO: 3111 - RNA, 20 nt, synthetic construct
  source 1..20: mol_type = other RNA
tcgtaggcgaactgttcata

SEQ ID NO: 3112 - RNA, 20 nt, synthetic construct
  source 1..20: mol_type = other RNA
tctcacaccctgcagtggat

SEQ ID NO: 3113 - RNA, 20 nt, synthetic construct
  source 1..20: mol_type = other RNA
tctcaccctgaatgaggacc

SEQ ID NO: 3114 - RNA, 20 nt, synthetic construct
  source 1..20: mol_type = other RNA
tctccaggtatttgtggagc

SEQ ID NO: 3115 - RNA, 20 nt, synthetic construct
  source 1..20: mol_type = other RNA
tctccgagcaaaagtcaaat

SEQ ID NO: 3116 - RNA, 20 nt, synthetic construct
  source 1..20: mol_type = other RNA
tctccttccccttctccagg

SEQ ID NO: 3117 - RNA, 20 nt, synthetic construct
  source 1..20: mol_type = other RNA
tctctggtgctccgcctcag

SEQ ID NO: 3118 - RNA, 20 nt, synthetic construct
  source 1..20: mol_type = other RNA
tctgagccgccgtgtccacc

SEQ ID NO: 3119 - RNA, 20 nt, synthetic construct
  source 1..20: mol_type = other RNA
tctgaggcggagcaccagag

SEQ ID NO: 3120 - RNA, 20 nt, synthetic construct
  source 1..20: mol_type = other RNA
tctggtgctccgcctcagag

SEQ ID NO: 3121 - RNA, 20 nt, synthetic construct
  source 1..20: mol_type = other RNA
tcttacccaggtgaagcagc

SEQ ID NO: 3122 - RNA, 20 nt, synthetic construct
  source 1..20: mol_type = other RNA
tcttccaggtaggctctctg

SEQ ID NO: 3123 - RNA, 20 nt, synthetic construct
  source 1..20: mol_type = other RNA
tgaacagttcgcctacgacg

SEQ ID NO: 3124 - RNA, 20 nt, synthetic construct
  source 1..20: mol_type = other RNA
tgaagcagcgtctccttccc

SEQ ID NO: 3125 - RNA, 20 nt, synthetic construct
  source 1..20: mol_type = other RNA
tgaatgaggacctgcgctcc

SEQ ID NO: 3126 - RNA, 20 nt, synthetic construct
  source 1..20: mol_type = other RNA
tgactaaggggcggggccag

SEQ ID NO: 3127 - RNA, 20 nt, synthetic construct
  source 1..20: mol_type = other RNA
tgacttttgctcggagatct

SEQ ID NO: 3128 - RNA, 20 nt, synthetic construct
  source 1..20: mol_type = other RNA
tgagaccctggccccgcccc

SEQ ID NO: 3129 - RNA, 20 nt, synthetic construct
  source 1..20: mol_type = other RNA
tgagataatccttgccgtcg

SEQ ID NO: 3130 - RNA, 20 nt, synthetic construct
  source 1..20: mol_type = other RNA
tgagccgccgtgtccaccgc

SEQ ID NO: 3131 - RNA, 20 nt, synthetic construct
  source 1..20: mol_type = other RNA
tgaggacctgcgctcctgga

SEQ ID NO: 3132 - RNA, 20 nt, synthetic construct
  source 1..20: mol_type = other RNA
tgaggcggagcaccagagag

SEQ ID NO: 3133 - RNA, 20 nt, synthetic construct
  source 1..20: mol_type = other RNA
tgatgcctctgaggcggagc

SEQ ID NO: 3134 - RNA, 20 nt, synthetic construct
  source 1..20: mol_type = other RNA
tgcagggtgtgagaccctgg

SEQ ID NO: 3135 - RNA, 20 nt, synthetic construct
  source 1..20: mol_type = other RNA
tgcagtggatgcatggctgc

SEQ ID NO: 3136 - RNA, 20 nt, synthetic construct
  source 1..20: mol_type = other RNA
tgcatccactgcagggtgtg

SEQ ID NO: 3137 - RNA, 20 nt, synthetic construct
  source 1..20: mol_type = other RNA
tgcatggctgcgagctgggg

SEQ ID NO: 3138 - RNA, 20 nt, synthetic construct
  source 1..20: mol_type = other RNA
tgcccacagggtggtggcga

SEQ ID NO: 3139 - RNA, 20 nt, synthetic construct
  source 1..20: mol_type = other RNA
tgccgtcgtaggcgaactgt

SEQ ID NO: 3140 - RNA, 20 nt, synthetic construct
  source 1..20: mol_type = other RNA
tgcctctgaggcggagcacc

SEQ ID NO: 3141 - RNA, 20 nt, synthetic construct
  source 1..20: mol_type = other RNA
tgcgagctggggcccgacgg

SEQ ID NO: 3142 - RNA, 20 nt, synthetic construct
  source 1..20: mol_type = other RNA
tgcgctcctggaccgcggtg

SEQ ID NO: 3143 - RNA, 20 nt, synthetic construct
  source 1..20: mol_type = other RNA
tgcgtggagtggctccacaa

SEQ ID NO: 3144 - RNA, 20 nt, synthetic construct
  source 1..20: mol_type = other RNA
tgctccgcctcagaggcatc

SEQ ID NO: 3145 - RNA, 20 nt, synthetic construct
  source 1..20: mol_type = other RNA
tgctcggagatctgagccgc

SEQ ID NO: 3146 - RNA, 20 nt, synthetic construct
  source 1..20: mol_type = other RNA
tgcttcacctgggtaagagg

SEQ ID NO: 3147 - RNA, 20 nt, synthetic construct
  source 1..20: mol_type = other RNA
tggaagacacatgcgtggag

SEQ ID NO: 3148 - RNA, 20 nt, synthetic construct
  source 1..20: mol_type = other RNA
tggacacggcggctcagatc

SEQ ID NO: 3149 - RNA, 20 nt, synthetic construct
  source 1..20: mol_type = other RNA
tggaccctcttacccaggtg

SEQ ID NO: 3150 - RNA, 20 nt, synthetic construct
  source 1..20: mol_type = other RNA
tggaccgcggtggacacggc

SEQ ID NO: 3151 - RNA, 20 nt, synthetic construct
  source 1..20: mol_type = other RNA
tggagaaggggaaggagacg

SEQ ID NO: 3152 - RNA, 20 nt, synthetic construct
  source 1..20: mol_type = other RNA
tggagccactccacgcatgt

SEQ ID NO: 3153 - RNA, 20 nt, synthetic construct
  source 1..20: mol_type = other RNA
tggagtggctccacaaatac

SEQ ID NO: 3154 - RNA, 20 nt, synthetic construct
  source 1..20: mol_type = other RNA
tggatgcatggctgcgagct

SEQ ID NO: 3155 - RNA, 20 nt, synthetic construct
  source 1..20: mol_type = other RNA
tggccccgccccttagtcag

SEQ ID NO: 3156 - RNA, 20 nt, synthetic construct
  source 1..20: mol_type = other RNA
tggcgacgggggcggggctt

SEQ ID NO: 3157 - RNA, 20 nt, synthetic construct
  source 1..20: mol_type = other RNA
tggctccacaaatacctgga

SEQ ID NO: 3158 - RNA, 20 nt, synthetic construct
  source 1..20: mol_type = other RNA
tggctgcgagctggggcccg

SEQ ID NO: 3159 - RNA, 20 nt, synthetic construct
  source 1..20: mol_type = other RNA
tgggagagtagccctgtgga

SEQ ID NO: 3160 - RNA, 20 nt, synthetic construct
  source 1..20: mol_type = other RNA
tgggcgggactgactaaggg

SEQ ID NO: 3161 - RNA, 20 nt, synthetic construct
  source 1..20: mol_type = other RNA
tgggtaagagggtccacagg

SEQ ID NO: 3162 - RNA, 20 nt, synthetic construct
  source 1..20: mol_type = other RNA
tggtgctccgcctcagaggc

SEQ ID NO: 3163 - RNA, 20 nt, synthetic construct
  source 1..20: mol_type = other RNA
tggtgggcgggactgactaa

SEQ ID NO: 3164 - RNA, 20 nt, synthetic construct
  source 1..20: mol_type = other RNA
tgtccaccgcggtccaggag

SEQ ID NO: 3165 - RNA, 20 nt, synthetic construct
  source 1..20: mol_type = other RNA
tgtcttccaggtaggctctc

SEQ ID NO: 3166 - RNA, 20 nt, synthetic construct
  source 1..20: mol_type = other RNA
tgtgagaccctggccccgcc

SEQ ID NO: 3167 - RNA, 20 nt, synthetic construct
  source 1..20: mol_type = other RNA
tgtggaccctcttacccagg

SEQ ID NO: 3168 - RNA, 20 nt, synthetic construct
  source 1..20: mol_type = other RNA
tgtggagccactccacgcat

SEQ ID NO: 3169 - RNA, 20 nt, synthetic construct
  source 1..20: mol_type = other RNA
tgtgtcttccaggtaggctc

SEQ ID NO: 3170 - RNA, 20 nt, synthetic construct
  source 1..20: mol_type = other RNA
ttacccaggtgaagcagcgt

SEQ ID NO: 3171 - RNA, 20 nt, synthetic construct
  source 1..20: mol_type = other RNA
ttagtcagtcccgcccacca

SEQ ID NO: 3172 - RNA, 20 nt, synthetic construct
  source 1..20: mol_type = other RNA
ttatctcaccctgaatgagg

SEQ ID NO: 3173 - RNA, 20 nt, synthetic construct
  source 1..20: mol_type = other RNA
ttcacctgggtaagagggtc

SEQ ID NO: 3174 - RNA, 20 nt, synthetic construct
  source 1..20: mol_type = other RNA
ttcagggtgagataatcctt

SEQ ID NO: 3175 - RNA, 20 nt, synthetic construct
  source 1..20: mol_type = other RNA
ttccaggtaggctctctggt

SEQ ID NO: 3176 - RNA, 20 nt, synthetic construct
  source 1..20: mol_type = other RNA
ttccccttctccaggtattt

SEQ ID NO: 3177 - RNA, 20 nt, synthetic construct
  source 1..20: mol_type = other RNA
ttcctccgcgggtatgaaca

SEQ ID NO: 3178 - RNA, 20 nt, synthetic construct
  source 1..20: mol_type = other RNA
ttcgcctacgacggcaagga

SEQ ID NO: 3179 - RNA, 20 nt, synthetic construct
  source 1..20: mol_type = other RNA
ttctccaggtatttgtggag

SEQ ID NO: 3180 - RNA, 20 nt, synthetic construct
  source 1..20: mol_type = other RNA
ttgacttttgctcggagatc

SEQ ID NO: 3181 - RNA, 20 nt, synthetic construct
  source 1..20: mol_type = other RNA
ttgccgtcgtaggcgaactg

SEQ ID NO: 3182 - RNA, 20 nt, synthetic construct
  source 1..20: mol_type = other RNA
ttgctcggagatctgagccg

SEQ ID NO: 3183 - RNA, 20 nt, synthetic construct
  source 1..20: mol_type = other RNA
ttggtgggcgggactgacta

SEQ ID NO: 3184 - RNA, 20 nt, synthetic construct
  source 1..20: mol_type = other RNA
ttgtggagccactccacgca

SEQ ID NO: 3185 - RNA, 20 nt, synthetic construct
  source 1..20: mol_type = other RNA
tttgacttttgctcggagat

SEQ ID NO: 3186 - RNA, 20 nt, synthetic construct
  source 1..20: mol_type = other RNA
tttgctcggagatctgagcc

SEQ ID NO: 3187 - RNA, 20 nt, synthetic construct
  source 1..20: mol_type = other RNA
tttgtggagccactccacgc

SEQ ID NO: 3188 - RNA, 20 nt, synthetic construct
  source 1..20: mol_type = other RNA
ttttgctcggagatctgagc

SEQ ID NO: 3189 - RNA, 21 nt, synthetic construct
  source 1..21: mol_type = other RNA
aaaagtcaaatgatgcctctg

SEQ ID NO: 3190 - RNA, 21 nt, synthetic construct
  source 1..21: mol_type = other RNA
aaaatgcccacagggtggtgg

SEQ ID NO: 3191 - RNA, 21 nt, synthetic construct
  source 1..21: mol_type = other RNA
aaagtcaaatgatgcctctga

SEQ ID NO: 3192 - RNA, 21 nt, synthetic construct
  source 1..21: mol_type = other RNA
aaatacctggagaaggggaag

SEQ ID NO: 3193 - RNA, 21 nt, synthetic construct
  source 1..21: mol_type = other RNA
aaatgatgcctctgaggcgga

SEQ ID NO: 3194 - RNA, 21 nt, synthetic construct
  source 1..21: mol_type = other RNA
aaatgcccacagggtggtggc

SEQ ID NO: 3195 - RNA, 21 nt, synthetic construct
  source 1..21: mol_type = other RNA
aacagttcgcctacgacggca

SEQ ID NO: 3196 - RNA, 21 nt, synthetic construct
  source 1..21: mol_type = other RNA
aactgttcatacccgcggagg

SEQ ID NO: 3197 - RNA, 21 nt, synthetic construct
  source 1..21: mol_type = other RNA
aagacacatgcgtggagtggc

SEQ ID NO: 3198 - RNA, 21 nt, synthetic construct
  source 1..21: mol_type = other RNA
aagagggtccacagggctact

SEQ ID NO: 3199 - RNA, 21 nt, synthetic construct
  source 1..21: mol_type = other RNA
aagcagcgtctccttcccctt

SEQ ID NO: 3200 - RNA, 21 nt, synthetic construct
  source 1..21: mol_type = other RNA
aaggagacgctgcttcacctg

SEQ ID NO: 3201 - RNA, 21 nt, synthetic construct
  source 1..21: mol_type = other RNA
aaggagatgggagagtagccc

SEQ ID NO: 3202 - RNA, 21 nt, synthetic construct
  source 1..21: mol_type = other RNA
aaggattatctcaccctgaat

SEQ ID NO: 3203 - RNA, 21 nt, synthetic construct
  source 1..21: mol_type = other RNA
aaggggaaggagacgctgctt

SEQ ID NO: 3204 - RNA, 21 nt, synthetic construct
  source 1..21: mol_type = other RNA
aaggggcggggccagggtctc

SEQ ID NO: 3205 - RNA, 21 nt, synthetic construct
  source 1..21: mol_type = other RNA
aagtcaaatgatgcctctgag

SEQ ID NO: 3206 - RNA, 21 nt, synthetic construct
  source 1..21: mol_type = other RNA
aatacctggagaaggggaagg

SEQ ID NO: 3207 - RNA, 21 nt, synthetic construct
  source 1..21: mol_type = other RNA
aatccttgccgtcgtaggcga

SEQ ID NO: 3208 - RNA, 21 nt, synthetic construct
  source 1..21: mol_type = other RNA
aatgaggacctgcgctcctgg

SEQ ID NO: 3209 - RNA, 21 nt, synthetic construct
  source 1..21: mol_type = other RNA
aatgatgcctctgaggcggag

SEQ ID NO: 3210 - RNA, 21 nt, synthetic construct
  source 1..21: mol_type = other RNA
aatgcccacagggtggtggcg

SEQ ID NO: 3211 - RNA, 21 nt, synthetic construct
  source 1..21: mol_type = other RNA
acaaatacctggagaagggga

SEQ ID NO: 3212 - RNA, 21 nt, synthetic construct
  source 1..21: mol_type = other RNA
acacatgcgtggagtggctcc

SEQ ID NO: 3213 - RNA, 21 nt, synthetic construct
  source 1..21: mol_type = other RNA
acaccctgcagtggatgcatg

SEQ ID NO: 3214 - RNA, 21 nt, synthetic construct
  source 1..21: mol_type = other RNA
acacggcggctcagatctccg

SEQ ID NO: 3215 - RNA, 21 nt, synthetic construct
  source 1..21: mol_type = other RNA
acagggtggtggcgacggggg

SEQ ID NO: 3216 - RNA, 21 nt, synthetic construct
  source 1..21: mol_type = other RNA
acagttcgcctacgacggcaa

SEQ ID NO: 3217 - RNA, 21 nt, synthetic construct
  source 1..21: mol_type = other RNA
acatgcgtggagtggctccac

SEQ ID NO: 3218 - RNA, 21 nt, synthetic construct
  source 1..21: mol_type = other RNA
accagagagcctacctggaag

SEQ ID NO: 3219 - RNA, 21 nt, synthetic construct
  source 1..21: mol_type = other RNA
acccaggtgaagcagcgtctc

SEQ ID NO: 3220 - RNA, 21 nt, synthetic construct
  source 1..21: mol_type = other RNA
accctcttacccaggtgaagc

SEQ ID NO: 3221 - RNA, 21 nt, synthetic construct
  source 1..21: mol_type = other RNA
accctgaatgaggacctgcgc

SEQ ID NO: 3222 - RNA, 21 nt, synthetic construct
  source 1..21: mol_type = other RNA
accctgcagtggatgcatggc

SEQ ID NO: 3223 - RNA, 21 nt, synthetic construct
  source 1..21: mol_type = other RNA
accctggccccgccccttagt

SEQ ID NO: 3224 - RNA, 21 nt, synthetic construct
  source 1..21: mol_type = other RNA
accgcggtccaggagcgcagg

SEQ ID NO: 3225 - RNA, 21 nt, synthetic construct
  source 1..21: mol_type = other RNA
accgcggtggacacggcggct

SEQ ID NO: 3226 - RNA, 21 nt, synthetic construct
  source 1..21: mol_type = other RNA
acctgcgctcctggaccgcgg

SEQ ID NO: 3227 - RNA, 21 nt, synthetic construct
  source 1..21: mol_type = other RNA
acctggaagacacatgcgtgg

SEQ ID NO: 3228 - RNA, 21 nt, synthetic construct
  source 1..21: mol_type = other RNA
acctggagaaggggaaggaga

SEQ ID NO: 3229 - RNA, 21 nt, synthetic construct
  source 1..21: mol_type = other RNA
acctgggtaagagggtccaca

SEQ ID NO: 3230 - RNA, 21 nt, synthetic construct
  source 1..21: mol_type = other RNA
acgacggcaaggattatctca

SEQ ID NO: 3231 - RNA, 21 nt, synthetic construct
  source 1..21: mol_type = other RNA
acgcatgtgtcttccaggtag

SEQ ID NO: 3232 - RNA, 21 nt, synthetic construct
  source 1..21: mol_type = other RNA
acgctgcttcacctgggtaag

SEQ ID NO: 3233 - RNA, 21 nt, synthetic construct
  source 1..21: mol_type = other RNA
acggcaaggattatctcaccc

SEQ ID NO: 3234 - RNA, 21 nt, synthetic construct
  source 1..21: mol_type = other RNA
acggcggctcagatctccgag

SEQ ID NO: 3235 - RNA, 21 nt, synthetic construct
  source 1..21: mol_type = other RNA
actaaggggcggggccagggt

SEQ ID NO: 3236 - RNA, 21 nt, synthetic construct
  source 1..21: mol_type = other RNA
actccacgcatgtgtcttcca

SEQ ID NO: 3237 - RNA, 21 nt, synthetic construct
  source 1..21: mol_type = other RNA
actgactaaggggcggggcca

SEQ ID NO: 3238 - RNA, 21 nt, synthetic construct
  source 1..21: mol_type = other RNA
actgcagggtgtgagaccctg

SEQ ID NO: 3239 - RNA, 21 nt, synthetic construct
  source 1..21: mol_type = other RNA
actgttcatacccgcggagga

SEQ ID NO: 3240 - RNA, 21 nt, synthetic construct
  source 1..21: mol_type = other RNA
acttttgctcggagatctgag

SEQ ID NO: 3241 - RNA, 21 nt, synthetic construct
  source 1..21: mol_type = other RNA
agaaggagatgggagagtagc

SEQ ID NO: 3242 - RNA, 21 nt, synthetic construct
  source 1..21: mol_type = other RNA
agaaggggaaggagacgctgc

SEQ ID NO: 3243 - RNA, 21 nt, synthetic construct
  source 1..21: mol_type = other RNA
agacacatgcgtggagtggct

SEQ ID NO: 3244 - RNA, 21 nt, synthetic construct
  source 1..21: mol_type = other RNA
agaccctggccccgcccctta

SEQ ID NO: 3245 - RNA, 21 nt, synthetic construct
  source 1..21: mol_type = other RNA
agacgctgcttcacctgggta

SEQ ID NO: 3246 - RNA, 21 nt, synthetic construct
  source 1..21: mol_type = other RNA
agagagcctacctggaagaca

SEQ ID NO: 3247 - RNA, 21 nt, synthetic construct
  source 1..21: mol_type = other RNA
agagcctacctggaagacaca

SEQ ID NO: 3248 - RNA, 21 nt, synthetic construct
  source 1..21: mol_type = other RNA
agaggcatcatttgacttttg

SEQ ID NO: 3249 - RNA, 21 nt, synthetic construct
  source 1..21: mol_type = other RNA
agagggtccacagggctactc

SEQ ID NO: 3250 - RNA, 21 nt, synthetic construct
  source 1..21: mol_type = other RNA
agagtagccctgtggaccctc

SEQ ID NO: 3251 - RNA, 21 nt, synthetic construct
  source 1..21: mol_type = other RNA
agataatccttgccgtcgtag

SEQ ID NO: 3252 - RNA, 21 nt, synthetic construct
  source 1..21: mol_type = other RNA
agatctccgagcaaaagtcaa

SEQ ID NO: 3253 - RNA, 21 nt, synthetic construct
  source 1..21: mol_type = other RNA
agatctgagccgccgtgtcca

SEQ ID NO: 3254 - RNA, 21 nt, synthetic construct
  source 1..21: mol_type = other RNA
agatgggagagtagccctgtg

SEQ ID NO: 3255 - RNA, 21 nt, synthetic construct
  source 1..21: mol_type = other RNA
agcaaaagtcaaatgatgcct

SEQ ID NO: 3256 - RNA, 21 nt, synthetic construct
  source 1..21: mol_type = other RNA
agcaccagagagcctacctgg

SEQ ID NO: 3257 - RNA, 21 nt, synthetic construct
  source 1..21: mol_type = other RNA
agcagcgtctccttccccttc

SEQ ID NO: 3258 - RNA, 21 nt, synthetic construct
  source 1..21: mol_type = other RNA
agccactccacgcatgtgtct

SEQ ID NO: 3259 - RNA, 21 nt, synthetic construct
  source 1..21: mol_type = other RNA
agccatgcatccactgcaggg

SEQ ID NO: 3260 - RNA, 21 nt, synthetic construct
  source 1..21: mol_type = other RNA
agccctgtggaccctcttacc

SEQ ID NO: 3261 - RNA, 21 nt, synthetic construct
  source 1..21: mol_type = other RNA
agccgccgtgtccaccgcggt

SEQ ID NO: 3262 - RNA, 21 nt, synthetic construct
  source 1..21: mol_type = other RNA
agcctacctggaagacacatg

SEQ ID NO: 3263 - RNA, 21 nt, synthetic construct
  source 1..21: mol_type = other RNA
agcgcaggtcctcattcaggg

SEQ ID NO: 3264 - RNA, 21 nt, synthetic construct
  source 1..21: mol_type = other RNA
agcgtctccttccccttctcc

SEQ ID NO: 3265 - RNA, 21 nt, synthetic construct
  source 1..21: mol_type = other RNA
agctcgcagccatgcatccac

SEQ ID NO: 3266 - RNA, 21 nt, synthetic construct
  source 1..21: mol_type = other RNA
aggacctgcgctcctggaccg

SEQ ID NO: 3267 - RNA, 21 nt, synthetic construct
  source 1..21: mol_type = other RNA
aggagacgctgcttcacctgg

SEQ ID NO: 3268 - RNA, 21 nt, synthetic construct
  source 1..21: mol_type = other RNA
aggagatgggagagtagccct

SEQ ID NO: 3269 - RNA, 21 nt, synthetic construct
  source 1..21: mol_type = other RNA
aggagcgcaggtcctcattca

SEQ ID NO: 3270 - RNA, 21 nt, synthetic construct
  source 1..21: mol_type = other RNA
aggattatctcaccctgaatg

SEQ ID NO: 3271 - RNA, 21 nt, synthetic construct
  source 1..21: mol_type = other RNA
aggcatcatttgacttttgct

SEQ ID NO: 3272 - RNA, 21 nt, synthetic construct
  source 1..21: mol_type = other RNA
aggcgaactgttcatacccgc

SEQ ID NO: 3273 - RNA, 21 nt, synthetic construct
  source 1..21: mol_type = other RNA
aggcggagcaccagagagcct

SEQ ID NO: 3274 - RNA, 21 nt, synthetic construct
  source 1..21: mol_type = other RNA
aggctctctggtgctccgcct

SEQ ID NO: 3275 - RNA, 21 nt, synthetic construct
  source 1..21: mol_type = other RNA
aggggaaggagacgctgcttc

SEQ ID NO: 3276 - RNA, 21 nt, synthetic construct
  source 1..21: mol_type = other RNA
aggggcggggccagggtctca

SEQ ID NO: 3277 - RNA, 21 nt, synthetic construct
  source 1..21: mol_type = other RNA
agggtccacagggctactctc

SEQ ID NO: 3278 - RNA, 21 nt, synthetic construct
  source 1..21: mol_type = other RNA
agggtctcacaccctgcagtg

SEQ ID NO: 3279 - RNA, 21 nt, synthetic construct
  source 1..21: mol_type = other RNA
agggtgagataatccttgccg

SEQ ID NO: 3280 - RNA, 21 nt, synthetic construct
  source 1..21: mol_type = other RNA
agggtgtgagaccctggcccc

SEQ ID NO: 3281 - RNA, 21 nt, synthetic construct
  source 1..21: mol_type = other RNA
aggtaggctctctggtgctcc

SEQ ID NO: 3282 - RNA, 21 nt, synthetic construct
  source 1..21: mol_type = other RNA
aggtatttgtggagccactcc

SEQ ID NO: 3283 - RNA, 21 nt, synthetic construct
  source 1..21: mol_type = other RNA
aggtcctcattcagggtgaga

SEQ ID NO: 3284 - RNA, 21 nt, synthetic construct
  source 1..21: mol_type = other RNA
aggtgaagcagcgtctccttc

SEQ ID NO: 3285 - RNA, 21 nt, synthetic construct
  source 1..21: mol_type = other RNA
agtagccctgtggaccctctt

SEQ ID NO: 3286 - RNA, 21 nt, synthetic construct
  source 1..21: mol_type = other RNA
agtcaaatgatgcctctgagg

SEQ ID NO: 3287 - RNA, 21 nt, synthetic construct
  source 1..21: mol_type = other RNA
agtcagtcccgcccaccaagc

SEQ ID NO: 3288 - RNA, 21 nt, synthetic construct
  source 1..21: mol_type = other RNA
agtcccgcccaccaagccccg

SEQ ID NO: 3289 - RNA, 21 nt, synthetic construct
  source 1..21: mol_type = other RNA
agtggatgcatggctgcgagc

SEQ ID NO: 3290 - RNA, 21 nt, synthetic construct
  source 1..21: mol_type = other RNA
agtggctccacaaatacctgg

SEQ ID NO: 3291 - RNA, 21 nt, synthetic construct
  source 1..21: mol_type = other RNA
agttcgcctacgacggcaagg

SEQ ID NO: 3292 - RNA, 21 nt, synthetic construct
  source 1..21: mol_type = other RNA
ataatccttgccgtcgtaggc

SEQ ID NO: 3293 - RNA, 21 nt, synthetic construct
  source 1..21: mol_type = other RNA
atacctggagaaggggaagga

SEQ ID NO: 3294 - RNA, 21 nt, synthetic construct
  source 1..21: mol_type = other RNA
atcatttgacttttgctcgga

SEQ ID NO: 3295 - RNA, 21 nt, synthetic construct
  source 1..21: mol_type = other RNA
atccactgcagggtgtgagac

SEQ ID NO: 3296 - RNA, 21 nt, synthetic construct
  source 1..21: mol_type = other RNA
atccttgccgtcgtaggcgaa

SEQ ID NO: 3297 - RNA, 21 nt, synthetic construct
  source 1..21: mol_type = other RNA
atctcaccctgaatgaggacc

SEQ ID NO: 3298 - RNA, 21 nt, synthetic construct
  source 1..21: mol_type = other RNA
atctccgagcaaaagtcaaat

SEQ ID NO: 3299 - RNA, 21 nt, synthetic construct
  source 1..21: mol_type = other RNA
atctgagccgccgtgtccacc

SEQ ID NO: 3300 - RNA, 21 nt, synthetic construct
  source 1..21: mol_type = other RNA
atgaacagttcgcctacgacg

SEQ ID NO: 3301 - RNA, 21 nt, synthetic construct
  source 1..21: mol_type = other RNA
atgaggacctgcgctcctgga

SEQ ID NO: 3302 - RNA, 21 nt, synthetic construct
  source 1..21: mol_type = other RNA
atgatgcctctgaggcggagc

SEQ ID NO: 3303 - RNA, 21 nt, synthetic construct
  source 1..21: mol_type = other RNA
atgcatccactgcagggtgtg

SEQ ID NO: 3304 - RNA, 21 nt, synthetic construct
  source 1..21: mol_type = other RNA
atgcatggctgcgagctgggg

SEQ ID NO: 3305 - RNA, 21 nt, synthetic construct
  source 1..21: mol_type = other RNA
atgcccacagggtggtggcga

SEQ ID NO: 3306 - RNA, 21 nt, synthetic construct
  source 1..21: mol_type = other RNA
atgcctctgaggcggagcacc

SEQ ID NO: 3307 - RNA, 21 nt, synthetic construct
  source 1..21: mol_type = other RNA
atgcgtggagtggctccacaa

SEQ ID NO: 3308 - RNA, 21 nt, synthetic construct
  source 1..21: mol_type = other RNA
atggctgcgagctggggcccg

SEQ ID NO: 3309 - RNA, 21 nt, synthetic construct
  source 1..21: mol_type = other RNA
atgggagagtagccctgtgga

SEQ ID NO: 3310 - RNA, 21 nt, synthetic construct
  source 1..21: mol_type = other RNA
atgtgtcttccaggtaggctc

SEQ ID NO: 3311 - RNA, 21 nt, synthetic construct
  source 1..21: mol_type = other RNA
attatctcaccctgaatgagg

SEQ ID NO: 3312 - RNA, 21 nt, synthetic construct
  source 1..21: mol_type = other RNA
attcagggtgagataatcctt

SEQ ID NO: 3313 - RNA, 21 nt, synthetic construct
  source 1..21: mol_type = other RNA
atttgacttttgctcggagat

SEQ ID NO: 3314 - RNA, 21 nt, synthetic construct
  source 1..21: mol_type = other RNA
atttgtggagccactccacgc

SEQ ID NO: 3315 - RNA, 21 nt, synthetic construct
  source 1..21: mol_type = other RNA
caaaagtcaaatgatgcctct

SEQ ID NO: 3316 - RNA, 21 nt, synthetic construct
  source 1..21: mol_type = other RNA
caaatacctggagaaggggaa

SEQ ID NO: 3317 - RNA, 21 nt, synthetic construct
  source 1..21: mol_type = other RNA
caaatgatgcctctgaggcgg

SEQ ID NO: 3318 - RNA, 21 nt, synthetic construct
  source 1..21: mol_type = other RNA
caaggattatctcaccctgaa

SEQ ID NO: 3319 - RNA, 21 nt, synthetic construct
  source 1..21: mol_type = other RNA
cacaaatacctggagaagggg

SEQ ID NO: 3320 - RNA, 21 nt, synthetic construct
  source 1..21: mol_type = other RNA
cacaccctgcagtggatgcat

SEQ ID NO: 3321 - RNA, 21 nt, synthetic construct
  source 1..21: mol_type = other RNA
cacagggtggtggcgacgggg

SEQ ID NO: 3322 - RNA, 21 nt, synthetic construct
  source 1..21: mol_type = other RNA
cacatgcgtggagtggctcca

SEQ ID NO: 3323 - RNA, 21 nt, synthetic construct
  source 1..21: mol_type = other RNA
caccagagagcctacctggaa

SEQ ID NO: 3324 - RNA, 21 nt, synthetic construct
  source 1..21: mol_type = other RNA
caccctgaatgaggacctgcg

SEQ ID NO: 3325 - RNA, 21 nt, synthetic construct
  source 1..21: mol_type = other RNA
caccctgcagtggatgcatgg

SEQ ID NO: 3326 - RNA, 21 nt, synthetic construct
  source 1..21: mol_type = other RNA
caccgcggtccaggagcgcag

SEQ ID NO: 3327 - RNA, 21 nt, synthetic construct
  source 1..21: mol_type = other RNA
cacctgggtaagagggtccac

SEQ ID NO: 3328 - RNA, 21 nt, synthetic construct
  source 1..21: mol_type = other RNA
cacgcatgtgtcttccaggta

SEQ ID NO: 3329 - RNA, 21 nt, synthetic construct
  source 1..21: mol_type = other RNA
cacggcggctcagatctccga

SEQ ID NO: 3330 - RNA, 21 nt, synthetic construct
  source 1..21: mol_type = other RNA
cactccacgcatgtgtcttcc

SEQ ID NO: 3331 - RNA, 21 nt, synthetic construct
  source 1..21: mol_type = other RNA
cactgcagggtgtgagaccct

SEQ ID NO: 3332 - RNA, 21 nt, synthetic construct
  source 1..21: mol_type = other RNA
cagagagcctacctggaagac

SEQ ID NO: 3333 - RNA, 21 nt, synthetic construct
  source 1..21: mol_type = other RNA
cagaggcatcatttgactttt

SEQ ID NO: 3334 - RNA, 21 nt, synthetic construct
  source 1..21: mol_type = other RNA
cagatctccgagcaaaagtca

SEQ ID NO: 3335 - RNA, 21 nt, synthetic construct
  source 1..21: mol_type = other RNA
cagccatgcatccactgcagg

SEQ ID NO: 3336 - RNA, 21 nt, synthetic construct
  source 1..21: mol_type = other RNA
cagcgtctccttccccttctc

SEQ ID NO: 3337 - RNA, 21 nt, synthetic construct
  source 1..21: mol_type = other RNA
cagctcgcagccatgcatcca

SEQ ID NO: 3338 - RNA, 21 nt, synthetic construct
  source 1..21: mol_type = other RNA
caggagcgcaggtcctcattc

SEQ ID NO: 3339 - RNA, 21 nt, synthetic construct
  source 1..21: mol_type = other RNA
cagggtctcacaccctgcagt

SEQ ID NO: 3340 - RNA, 21 nt, synthetic construct
  source 1..21: mol_type = other RNA
cagggtgagataatccttgcc

SEQ ID NO: 3341 - RNA, 21 nt, synthetic construct
  source 1..21: mol_type = other RNA
cagggtgtgagaccctggccc

SEQ ID NO: 3342 - RNA, 21 nt, synthetic construct
  source 1..21: mol_type = other RNA
caggtaggctctctggtgctc

SEQ ID NO: 3343 - RNA, 21 nt, synthetic construct
  source 1..21: mol_type = other RNA
caggtatttgtggagccactc

SEQ ID NO: 3344 - RNA, 21 nt, synthetic construct
  source 1..21: mol_type = other RNA
caggtcctcattcagggtgag

SEQ ID NO: 3345 - RNA, 21 nt, synthetic construct
  source 1..21: mol_type = other RNA
caggtgaagcagcgtctcctt

SEQ ID NO: 3346 - RNA, 21 nt, synthetic construct
  source 1..21: mol_type = other RNA
cagtcccgcccaccaagcccc

SEQ ID NO: 3347 - RNA, 21 nt, synthetic construct
  source 1..21: mol_type = other RNA
cagtggatgcatggctgcgag

SEQ ID NO: 3348 - RNA, 21 nt, synthetic construct
  source 1..21: mol_type = other RNA
cagttcgcctacgacggcaag

SEQ ID NO: 3349 - RNA, 21 nt, synthetic construct
  source 1..21: mol_type = other RNA
catcatttgacttttgctcgg

SEQ ID NO: 3350 - RNA, 21 nt, synthetic construct
  source 1..21: mol_type = other RNA
catccactgcagggtgtgaga

SEQ ID NO: 3351 - RNA, 21 nt, synthetic construct
  source 1..21: mol_type = other RNA
catgcatccactgcagggtgt

SEQ ID NO: 3352 - RNA, 21 nt, synthetic construct
  source 1..21: mol_type = other RNA
catgcgtggagtggctccaca

SEQ ID NO: 3353 - RNA, 21 nt, synthetic construct
  source 1..21: mol_type = other RNA
catggctgcgagctggggccc

SEQ ID NO: 3354 - RNA, 21 nt, synthetic construct
  source 1..21: mol_type = other RNA
catgtgtcttccaggtaggct

SEQ ID NO: 3355 - RNA, 21 nt, synthetic construct
  source 1..21: mol_type = other RNA
cattcagggtgagataatcct

SEQ ID NO: 3356 - RNA, 21 nt, synthetic construct
  source 1..21: mol_type = other RNA
catttgacttttgctcggaga

SEQ ID NO: 3357 - RNA, 21 nt, synthetic construct
  source 1..21: mol_type = other RNA
ccacaaatacctggagaaggg

SEQ ID NO: 3358 - RNA, 21 nt, synthetic construct
  source 1..21: mol_type = other RNA
ccacagggtggtggcgacggg

SEQ ID NO: 3359 - RNA, 21 nt, synthetic construct
  source 1..21: mol_type = other RNA
ccaccgcggtccaggagcgca

SEQ ID NO: 3360 - RNA, 21 nt, synthetic construct
  source 1..21: mol_type = other RNA
ccacgcatgtgtcttccaggt

SEQ ID NO: 3361 - RNA, 21 nt, synthetic construct
  source 1..21: mol_type = other RNA
ccactccacgcatgtgtcttc

SEQ ID NO: 3362 - RNA, 21 nt, synthetic construct
  source 1..21: mol_type = other RNA
ccactgcagggtgtgagaccc

SEQ ID NO: 3363 - RNA, 21 nt, synthetic construct
  source 1..21: mol_type = other RNA
ccagagagcctacctggaaga

SEQ ID NO: 3364 - RNA, 21 nt, synthetic construct
  source 1..21: mol_type = other RNA
ccagctcgcagccatgcatcc

SEQ ID NO: 3365 - RNA, 21 nt, synthetic construct
  source 1..21: mol_type = other RNA
ccaggagcgcaggtcctcatt

SEQ ID NO: 3366 - RNA, 21 nt, synthetic construct
  source 1..21: mol_type = other RNA
ccagggtctcacaccctgcag

SEQ ID NO: 3367 - RNA, 21 nt, synthetic construct
  source 1..21: mol_type = other RNA
ccaggtaggctctctggtgct

SEQ ID NO: 3368 - RNA, 21 nt, synthetic construct
  source 1..21: mol_type = other RNA
ccaggtatttgtggagccact

SEQ ID NO: 3369 - RNA, 21 nt, synthetic construct
  source 1..21: mol_type = other RNA
ccaggtgaagcagcgtctcct

SEQ ID NO: 3370 - RNA, 21 nt, synthetic construct
  source 1..21: mol_type = other RNA
ccatgcatccactgcagggtg

SEQ ID NO: 3371 - RNA, 21 nt, synthetic construct
  source 1..21: mol_type = other RNA
cccacagggtggtggcgacgg

SEQ ID NO: 3372 - RNA, 21 nt, synthetic construct
  source 1..21: mol_type = other RNA
cccagctcgcagccatgcatc

SEQ ID NO: 3373 - RNA, 21 nt, synthetic construct
  source 1..21: mol_type = other RNA
cccaggtgaagcagcgtctcc

SEQ ID NO: 3374 - RNA, 21 nt, synthetic construct
  source 1..21: mol_type = other RNA
ccccagctcgcagccatgcat

SEQ ID NO: 3375 - RNA, 21 nt, synthetic construct
  source 1..21: mol_type = other RNA
cccccgtcgccaccaccctgt

SEQ ID NO: 3376 - RNA, 21 nt, synthetic construct
  source 1..21: mol_type = other RNA
ccccgccccttagtcagtccc

SEQ ID NO: 3377 - RNA, 21 nt, synthetic construct
  source 1..21: mol_type = other RNA
ccccgtcgccaccaccctgtg

SEQ ID NO: 3378 - RNA, 21 nt, synthetic construct
  source 1..21: mol_type = other RNA
ccccttagtcagtcccgccca

SEQ ID NO: 3379 - RNA, 21 nt, synthetic construct
  source 1..21: mol_type = other RNA
ccccttctccaggtatttgtg

SEQ ID NO: 3380 - RNA, 21 nt, synthetic construct
  source 1..21: mol_type = other RNA
cccgccccttagtcagtcccg

SEQ ID NO: 3381 - RNA, 21 nt, synthetic construct
  source 1..21: mol_type = other RNA
ccctcttacccaggtgaagca

SEQ ID NO: 3382 - RNA, 21 nt, synthetic construct
  source 1..21: mol_type = other RNA
ccctgaatgaggacctgcgct

SEQ ID NO: 3383 - RNA, 21 nt, synthetic construct
  source 1..21: mol_type = other RNA
ccctgcagtggatgcatggct

SEQ ID NO: 3384 - RNA, 21 nt, synthetic construct
  source 1..21: mol_type = other RNA
ccctggccccgccccttagtc

SEQ ID NO: 3385 - RNA, 21 nt, synthetic construct
  source 1..21: mol_type = other RNA
ccctgtggaccctcttaccca

SEQ ID NO: 3386 - RNA, 21 nt, synthetic construct
  source 1..21: mol_type = other RNA
cccttagtcagtcccgcccac

SEQ ID NO: 3387 - RNA, 21 nt, synthetic construct
  source 1..21: mol_type = other RNA
cccttctccaggtatttgtgg

SEQ ID NO: 3388 - RNA, 21 nt, synthetic construct
  source 1..21: mol_type = other RNA
ccgagcaaaagtcaaatgatg

SEQ ID NO: 3389 - RNA, 21 nt, synthetic construct
  source 1..21: mol_type = other RNA
ccgccccttagtcagtcccgc

SEQ ID NO: 3390 - RNA, 21 nt, synthetic construct
  source 1..21: mol_type = other RNA
ccgcctcagaggcatcatttg

SEQ ID NO: 3391 - RNA, 21 nt, synthetic construct
  source 1..21: mol_type = other RNA
ccgcgggtatgaacagttcgc

SEQ ID NO: 3392 - RNA, 21 nt, synthetic construct
  source 1..21: mol_type = other RNA
ccgcggtccaggagcgcaggt

SEQ ID NO: 3393 - RNA, 21 nt, synthetic construct
  source 1..21: mol_type = other RNA
ccgtcgtaggcgaactgttca

SEQ ID NO: 3394 - RNA, 21 nt, synthetic construct
  source 1..21: mol_type = other RNA
ccgtgtccaccgcggtccagg

SEQ ID NO: 3395 - RNA, 21 nt, synthetic construct
  source 1..21: mol_type = other RNA
cctacctggaagacacatgcg

SEQ ID NO: 3396 - RNA, 21 nt, synthetic construct
  source 1..21: mol_type = other RNA
cctacgacggcaaggattatc

SEQ ID NO: 3397 - RNA, 21 nt, synthetic construct
  source 1..21: mol_type = other RNA
cctcagaggcatcatttgact

SEQ ID NO: 3398 - RNA, 21 nt, synthetic construct
  source 1..21: mol_type = other RNA
cctcattcagggtgagataat

SEQ ID NO: 3399 - RNA, 21 nt, synthetic construct
  source 1..21: mol_type = other RNA
cctccgcgggtatgaacagtt

SEQ ID NO: 3400 - RNA, 21 nt, synthetic construct
  source 1..21: mol_type = other RNA
cctctgaggcggagcaccaga

SEQ ID NO: 3401 - RNA, 21 nt, synthetic construct
  source 1..21: mol_type = other RNA
cctcttacccaggtgaagcag

SEQ ID NO: 3402 - RNA, 21 nt, synthetic construct
  source 1..21: mol_type = other RNA
cctgaatgaggacctgcgctc

SEQ ID NO: 3403 - RNA, 21 nt, synthetic construct
  source 1..21: mol_type = other RNA
cctgcagtggatgcatggctg

SEQ ID NO: 3404 - RNA, 21 nt, synthetic construct
  source 1..21: mol_type = other RNA
cctgcgctcctggaccgcggt

SEQ ID NO: 3405 - RNA, 21 nt, synthetic construct
  source 1..21: mol_type = other RNA
cctggaagacacatgcgtgga

SEQ ID NO: 3406 - RNA, 21 nt, synthetic construct
  source 1..21: mol_type = other RNA
cctggaccgcggtggacacgg

SEQ ID NO: 3407 - RNA, 21 nt, synthetic construct
  source 1..21: mol_type = other RNA
cctggagaaggggaaggagac

SEQ ID NO: 3408 - RNA, 21 nt, synthetic construct
  source 1..21: mol_type = other RNA
cctggccccgccccttagtca

SEQ ID NO: 3409 - RNA, 21 nt, synthetic construct
  source 1..21: mol_type = other RNA
cctgggtaagagggtccacag

SEQ ID NO: 3410 - RNA, 21 nt, synthetic construct
  source 1..21: mol_type = other RNA
cctgtggaccctcttacccag

SEQ ID NO: 3411 - RNA, 21 nt, synthetic construct
  source 1..21: mol_type = other RNA
ccttagtcagtcccgcccacc

SEQ ID NO: 3412 - RNA, 21 nt, synthetic construct
  source 1..21: mol_type = other RNA
ccttccccttctccaggtatt

SEQ ID NO: 3413 - RNA, 21 nt, synthetic construct
  source 1..21: mol_type = other RNA
ccttctccaggtatttgtgga

SEQ ID NO: 3414 - RNA, 21 nt, synthetic construct
  source 1..21: mol_type = other RNA
ccttgccgtcgtaggcgaact

SEQ ID NO: 3415 - RNA, 21 nt, synthetic construct
  source 1..21: mol_type = other RNA
cgaactgttcatacccgcgga

SEQ ID NO: 3416 - RNA, 21 nt, synthetic construct
  source 1..21: mol_type = other RNA
cgacggcaaggattatctcac

SEQ ID NO: 3417 - RNA, 21 nt, synthetic construct
  source 1..21: mol_type = other RNA
cgagcaaaagtcaaatgatgc

SEQ ID NO: 3418 - RNA, 21 nt, synthetic construct
  source 1..21: mol_type = other RNA
cgcagccatgcatccactgca

SEQ ID NO: 3419 - RNA, 21 nt, synthetic construct
  source 1..21: mol_type = other RNA
cgcaggtcctcattcagggtg

SEQ ID NO: 3420 - RNA, 21 nt, synthetic construct
  source 1..21: mol_type = other RNA
cgcatgtgtcttccaggtagg

SEQ ID NO: 3421 - RNA, 21 nt, synthetic construct
  source 1..21: mol_type = other RNA
cgccccttagtcagtcccgcc

SEQ ID NO: 3422 - RNA, 21 nt, synthetic construct
  source 1..21: mol_type = other RNA
cgccgtgtccaccgcggtcca

SEQ ID NO: 3423 - RNA, 21 nt, synthetic construct
  source 1..21: mol_type = other RNA
cgcctacgacggcaaggatta

SEQ ID NO: 3424 - RNA, 21 nt, synthetic construct
  source 1..21: mol_type = other RNA
cgcctcagaggcatcatttga

SEQ ID NO: 3425 - RNA, 21 nt, synthetic construct
  source 1..21: mol_type = other RNA
cgcgggtatgaacagttcgcc

SEQ ID NO: 3426 - RNA, 21 nt, synthetic construct
  source 1..21: mol_type = other RNA
cgcggtccaggagcgcaggtc

SEQ ID NO: 3427 - RNA, 21 nt, synthetic construct
  source 1..21: mol_type = other RNA
cgcggtggacacggcggctca

SEQ ID NO: 3428 - RNA, 21 nt, synthetic construct
  source 1..21: mol_type = other RNA
cgctcctggaccgcggtggac

SEQ ID NO: 3429 - RNA, 21 nt, synthetic construct
  source 1..21: mol_type = other RNA
cgctgcttcacctgggtaaga

SEQ ID NO: 3430 - RNA, 21 nt, synthetic construct
  source 1..21: mol_type = other RNA
cgcttcctccgcgggtatgaa

SEQ ID NO: 3431 - RNA, 21 nt, synthetic construct
  source 1..21: mol_type = other RNA
cggagatctgagccgccgtgt

SEQ ID NO: 3432 - RNA, 21 nt, synthetic construct
  source 1..21: mol_type = other RNA
cggagcaccagagagcctacc

SEQ ID NO: 3433 - RNA, 21 nt, synthetic construct
  source 1..21: mol_type = other RNA
cggcaaggattatctcaccct

SEQ ID NO: 3434 - RNA, 21 nt, synthetic construct
  source 1..21: mol_type = other RNA
cggcggctcagatctccgagc

SEQ ID NO: 3435 - RNA, 21 nt, synthetic construct
  source 1..21: mol_type = other RNA
cggctcagatctccgagcaaa

SEQ ID NO: 3436 - RNA, 21 nt, synthetic construct
  source 1..21: mol_type = other RNA
cgggactgactaaggggcggg

SEQ ID NO: 3437 - RNA, 21 nt, synthetic construct
  source 1..21: mol_type = other RNA
cgggccccagctcgcagccat

SEQ ID NO: 3438 - RNA, 21 nt, synthetic construct
  source 1..21: mol_type = other RNA
cgggcgcttcctccgcgggta

SEQ ID NO: 3439 - RNA, 21 nt, synthetic construct
  source 1..21: mol_type = other RNA
cggggccagggtctcacaccc

SEQ ID NO: 3440 - RNA, 21 nt, synthetic construct
  source 1..21: mol_type = other RNA
cggggcttggtgggcgggact

SEQ ID NO: 3441 - RNA, 21 nt, synthetic construct
  source 1..21: mol_type = other RNA
cgggtatgaacagttcgccta

SEQ ID NO: 3442 - RNA, 21 nt, synthetic construct
  source 1..21: mol_type = other RNA
cggtccaggagcgcaggtcct

SEQ ID NO: 3443 - RNA, 21 nt, synthetic construct
  source 1..21: mol_type = other RNA
cggtggacacggcggctcaga

SEQ ID NO: 3444 - RNA, 21 nt, synthetic construct
  source 1..21: mol_type = other RNA
cgtaggcgaactgttcatacc

SEQ ID NO: 3445 - RNA, 21 nt, synthetic construct
  source 1..21: mol_type = other RNA
cgtcgtaggcgaactgttcat

SEQ ID NO: 3446 - RNA, 21 nt, synthetic construct
  source 1..21: mol_type = other RNA
cgtctccttccccttctccag

SEQ ID NO: 3447 - RNA, 21 nt, synthetic construct
  source 1..21: mol_type = other RNA
cgtggagtggctccacaaata

SEQ ID NO: 3448 - RNA, 21 nt, synthetic construct
  source 1..21: mol_type = other RNA
cgtgtccaccgcggtccagga

SEQ ID NO: 3449 - RNA, 21 nt, synthetic construct
  source 1..21: mol_type = other RNA
ctaaggggcggggccagggtc

SEQ ID NO: 3450 - RNA, 21 nt, synthetic construct
  source 1..21: mol_type = other RNA
ctacctggaagacacatgcgt

SEQ ID NO: 3451 - RNA, 21 nt, synthetic construct
  source 1..21: mol_type = other RNA
ctacgacggcaaggattatct

SEQ ID NO: 3452 - RNA, 21 nt, synthetic construct
  source 1..21: mol_type = other RNA
ctcacaccctgcagtggatgc

SEQ ID NO: 3453 - RNA, 21 nt, synthetic construct
  source 1..21: mol_type = other RNA
ctcaccctgaatgaggacctg

SEQ ID NO: 3454 - RNA, 21 nt, synthetic construct
  source 1..21: mol_type = other RNA
ctcagaggcatcatttgactt

SEQ ID NO: 3455 - RNA, 21 nt, synthetic construct
  source 1..21: mol_type = other RNA
ctcagatctccgagcaaaagt

SEQ ID NO: 3456 - RNA, 21 nt, synthetic construct
  source 1..21: mol_type = other RNA
ctcattcagggtgagataatc

SEQ ID NO: 3457 - RNA, 21 nt, synthetic construct
  source 1..21: mol_type = other RNA
ctccacaaatacctggagaag

SEQ ID NO: 3458 - RNA, 21 nt, synthetic construct
  source 1..21: mol_type = other RNA
ctccacgcatgtgtcttccag

SEQ ID NO: 3459 - RNA, 21 nt, synthetic construct
  source 1..21: mol_type = other RNA
ctccaggtatttgtggagcca

SEQ ID NO: 3460 - RNA, 21 nt, synthetic construct
  source 1..21: mol_type = other RNA
ctccgagcaaaagtcaaatga

SEQ ID NO: 3461 - RNA, 21 nt, synthetic construct
  source 1..21: mol_type = other RNA
ctccgcctcagaggcatcatt

SEQ ID NO: 3462 - RNA, 21 nt, synthetic construct
  source 1..21: mol_type = other RNA
ctccgcgggtatgaacagttc

SEQ ID NO: 3463 - RNA, 21 nt, synthetic construct
  source 1..21: mol_type = other RNA
ctcctggaccgcggtggacac

SEQ ID NO: 3464 - RNA, 21 nt, synthetic construct
  source 1..21: mol_type = other RNA
ctccttccccttctccaggta

SEQ ID NO: 3465 - RNA, 21 nt, synthetic construct
  source 1..21: mol_type = other RNA
ctcgcagccatgcatccactg

SEQ ID NO: 3466 - RNA, 21 nt, synthetic construct
  source 1..21: mol_type = other RNA
ctcggagatctgagccgccgt

SEQ ID NO: 3467 - RNA, 21 nt, synthetic construct
  source 1..21: mol_type = other RNA
ctctctggtgctccgcctcag

SEQ ID NO: 3468 - RNA, 21 nt, synthetic construct
  source 1..21: mol_type = other RNA
ctctgaggcggagcaccagag

SEQ ID NO: 3469 - RNA, 21 nt, synthetic construct
  source 1..21: mol_type = other RNA
ctctggtgctccgcctcagag

SEQ ID NO: 3470 - RNA, 21 nt, synthetic construct
  source 1..21: mol_type = other RNA
ctcttacccaggtgaagcagc

SEQ ID NO: 3471 - RNA, 21 nt, synthetic construct
  source 1..21: mol_type = other RNA
ctgaatgaggacctgcgctcc

SEQ ID NO: 3472 - RNA, 21 nt, synthetic construct
  source 1..21: mol_type = other RNA
ctgactaaggggcggggccag

SEQ ID NO: 3473 - RNA, 21 nt, synthetic construct
  source 1..21: mol_type = other RNA
ctgagccgccgtgtccaccgc

SEQ ID NO: 3474 - RNA, 21 nt, synthetic construct
  source 1..21: mol_type = other RNA
ctgaggcggagcaccagagag

SEQ ID NO: 3475 - RNA, 21 nt, synthetic construct
  source 1..21: mol_type = other RNA
ctgcagggtgtgagaccctgg

SEQ ID NO: 3476 - RNA, 21 nt, synthetic construct
  source 1..21: mol_type = other RNA
ctgcagtggatgcatggctgc

SEQ ID NO: 3477 - RNA, 21 nt, synthetic construct
  source 1..21: mol_type = other RNA
ctgcgctcctggaccgcggtg

SEQ ID NO: 3478 - RNA, 21 nt, synthetic construct
  source 1..21: mol_type = other RNA
ctgcttcacctgggtaagagg

SEQ ID NO: 3479 - RNA, 21 nt, synthetic construct
  source 1..21: mol_type = other RNA
ctggaagacacatgcgtggag

SEQ ID NO: 3480 - RNA, 21 nt, synthetic construct
  source 1..21: mol_type = other RNA
ctggaccgcggtggacacggc

SEQ ID NO: 3481 - RNA, 21 nt, synthetic construct
  source 1..21: mol_type = other RNA
ctggagaaggggaaggagacg

SEQ ID NO: 3482 - RNA, 21 nt, synthetic construct
  source 1..21: mol_type = other RNA
ctggccccgccccttagtcag

SEQ ID NO: 3483 - RNA, 21 nt, synthetic construct
  source 1..21: mol_type = other RNA
ctgggtaagagggtccacagg

SEQ ID NO: 3484 - RNA, 21 nt, synthetic construct
  source 1..21: mol_type = other RNA
ctggtgctccgcctcagaggc

SEQ ID NO: 3485 - RNA, 21 nt, synthetic construct
  source 1..21: mol_type = other RNA
ctgtggaccctcttacccagg

SEQ ID NO: 3486 - RNA, 21 nt, synthetic construct
  source 1..21: mol_type = other RNA
cttacccaggtgaagcagcgt

SEQ ID NO: 3487 - RNA, 21 nt, synthetic construct
  source 1..21: mol_type = other RNA
cttagtcagtcccgcccacca

SEQ ID NO: 3488 - RNA, 21 nt, synthetic construct
  source 1..21: mol_type = other RNA
cttcacctgggtaagagggtc

SEQ ID NO: 3489 - RNA, 21 nt, synthetic construct
  source 1..21: mol_type = other RNA
cttccaggtaggctctctggt

SEQ ID NO: 3490 - RNA, 21 nt, synthetic construct
  source 1..21: mol_type = other RNA
cttccccttctccaggtattt

SEQ ID NO: 3491 - RNA, 21 nt, synthetic construct
  source 1..21: mol_type = other RNA
cttcctccgcgggtatgaaca

SEQ ID NO: 3492 - RNA, 21 nt, synthetic construct
  source 1..21: mol_type = other RNA
cttctccaggtatttgtggag

SEQ ID NO: 3493 - RNA, 21 nt, synthetic construct
  source 1..21: mol_type = other RNA
cttgccgtcgtaggcgaactg

SEQ ID NO: 3494 - RNA, 21 nt, synthetic construct
  source 1..21: mol_type = other RNA
cttggtgggcgggactgacta

SEQ ID NO: 3495 - RNA, 21 nt, synthetic construct
  source 1..21: mol_type = other RNA
cttttgctcggagatctgagc

SEQ ID NO: 3496 - RNA, 21 nt, synthetic construct
  source 1..21: mol_type = other RNA
gaacagttcgcctacgacggc

SEQ ID NO: 3497 - RNA, 21 nt, synthetic construct
  source 1..21: mol_type = other RNA
gaactgttcatacccgcggag

SEQ ID NO: 3498 - RNA, 21 nt, synthetic construct
  source 1..21: mol_type = other RNA
gaagacacatgcgtggagtgg

SEQ ID NO: 3499 - RNA, 21 nt, synthetic construct
  source 1..21: mol_type = other RNA
gaagcagcgtctccttcccct

SEQ ID NO: 3500 - RNA, 21 nt, synthetic construct
  source 1..21: mol_type = other RNA
gaaggagacgctgcttcacct

SEQ ID NO: 3501 - RNA, 21 nt, synthetic construct
  source 1..21: mol_type = other RNA
gaaggagatgggagagtagcc

SEQ ID NO: 3502 - RNA, 21 nt, synthetic construct
  source 1..21: mol_type = other RNA
gaaggggaaggagacgctgct

SEQ ID NO: 3503 - RNA, 21 nt, synthetic construct
  source 1..21: mol_type = other RNA
gaatgaggacctgcgctcctg

SEQ ID NO: 3504 - RNA, 21 nt, synthetic construct
  source 1..21: mol_type = other RNA
gacacatgcgtggagtggctc

SEQ ID NO: 3505 - RNA, 21 nt, synthetic construct
  source 1..21: mol_type = other RNA
gacacggcggctcagatctcc

SEQ ID NO: 3506 - RNA, 21 nt, synthetic construct
  source 1..21: mol_type = other RNA
gaccctcttacccaggtgaag

SEQ ID NO: 3507 - RNA, 21 nt, synthetic construct
  source 1..21: mol_type = other RNA
gaccctggccccgccccttag

SEQ ID NO: 3508 - RNA, 21 nt, synthetic construct
  source 1..21: mol_type = other RNA
gacctgcgctcctggaccgcg

SEQ ID NO: 3509 - RNA, 21 nt, synthetic construct
  source 1..21: mol_type = other RNA
gacgctgcttcacctgggtaa

SEQ ID NO: 3510 - RNA, 21 nt, synthetic construct
  source 1..21: mol_type = other RNA
gacggcaaggattatctcacc

SEQ ID NO: 3511 - RNA, 21 nt, synthetic construct
  source 1..21: mol_type = other RNA
gactaaggggcggggccaggg

SEQ ID NO: 3512 - RNA, 21 nt, synthetic construct
  source 1..21: mol_type = other RNA
gactgactaaggggcggggcc

SEQ ID NO: 3513 - RNA, 21 nt, synthetic construct
  source 1..21: mol_type = other RNA
gacttttgctcggagatctga

SEQ ID NO: 3514 - RNA, 21 nt, synthetic construct
  source 1..21: mol_type = other RNA
gagaaggggaaggagacgctg

SEQ ID NO: 3515 - RNA, 21 nt, synthetic construct
  source 1..21: mol_type = other RNA
gagaccctggccccgcccctt

SEQ ID NO: 3516 - RNA, 21 nt, synthetic construct
  source 1..21: mol_type = other RNA
gagacgctgcttcacctgggt

SEQ ID NO: 3517 - RNA, 21 nt, synthetic construct
  source 1..21: mol_type = other RNA
gagagcctacctggaagacac

SEQ ID NO: 3518 - RNA, 21 nt, synthetic construct
  source 1..21: mol_type = other RNA
gagagtagccctgtggaccct

SEQ ID NO: 3519 - RNA, 21 nt, synthetic construct
  source 1..21: mol_type = other RNA
gagataatccttgccgtcgta

SEQ ID NO: 3520 - RNA, 21 nt, synthetic construct
  source 1..21: mol_type = other RNA
gagatctgagccgccgtgtcc

SEQ ID NO: 3521 - RNA, 21 nt, synthetic construct
  source 1..21: mol_type = other RNA
gagatgggagagtagccctgt

SEQ ID NO: 3522 - RNA, 21 nt, synthetic construct
  source 1..21: mol_type = other RNA
gagcaaaagtcaaatgatgcc

SEQ ID NO: 3523 - RNA, 21 nt, synthetic construct
  source 1..21: mol_type = other RNA
gagcaccagagagcctacctg

SEQ ID NO: 3524 - RNA, 21 nt, synthetic construct
  source 1..21: mol_type = other RNA
gagccactccacgcatgtgtc

SEQ ID NO: 3525 - RNA, 21 nt, synthetic construct
  source 1..21: mol_type = other RNA
gagcctacctggaagacacat

SEQ ID NO: 3526 - RNA, 21 nt, synthetic construct
  source 1..21: mol_type = other RNA
gagcgcaggtcctcattcagg

SEQ ID NO: 3527 - RNA, 21 nt, synthetic construct
  source 1..21: mol_type = other RNA
gaggacctgcgctcctggacc

SEQ ID NO: 3528 - RNA, 21 nt, synthetic construct
  source 1..21: mol_type = other RNA
gaggcatcatttgacttttgc

SEQ ID NO: 3529 - RNA, 21 nt, synthetic construct
  source 1..21: mol_type = other RNA
gaggcggagcaccagagagcc

SEQ ID NO: 3530 - RNA, 21 nt, synthetic construct
  source 1..21: mol_type = other RNA
gagggtccacagggctactct

SEQ ID NO: 3531 - RNA, 21 nt, synthetic construct
  source 1..21: mol_type = other RNA
gagtagccctgtggaccctct

SEQ ID NO: 3532 - RNA, 21 nt, synthetic construct
  source 1..21: mol_type = other RNA
gagtggctccacaaatacctg

SEQ ID NO: 3533 - RNA, 21 nt, synthetic construct
  source 1..21: mol_type = other RNA
gataatccttgccgtcgtagg

SEQ ID NO: 3534 - RNA, 21 nt, synthetic construct
  source 1..21: mol_type = other RNA
gatctccgagcaaaagtcaaa

SEQ ID NO: 3535 - RNA, 21 nt, synthetic construct
  source 1..21: mol_type = other RNA
gatctgagccgccgtgtccac

SEQ ID NO: 3536 - RNA, 21 nt, synthetic construct
  source 1..21: mol_type = other RNA
gatgcatggctgcgagctggg

SEQ ID NO: 3537 - RNA, 21 nt, synthetic construct
  source 1..21: mol_type = other RNA
gatgcctctgaggcggagcac

SEQ ID NO: 3538 - RNA, 21 nt, synthetic construct
  source 1..21: mol_type = other RNA
gatgggagagtagccctgtgg

SEQ ID NO: 3539 - RNA, 21 nt, synthetic construct
  source 1..21: mol_type = other RNA
gattatctcaccctgaatgag

SEQ ID NO: 3540 - RNA, 21 nt, synthetic construct
  source 1..21: mol_type = other RNA
gcaaaagtcaaatgatgcctc

SEQ ID NO: 3541 - RNA, 21 nt, synthetic construct
  source 1..21: mol_type = other RNA
gcaaggattatctcaccctga

SEQ ID NO: 3542 - RNA, 21 nt, synthetic construct
  source 1..21: mol_type = other RNA
gcaccagagagcctacctgga

SEQ ID NO: 3543 - RNA, 21 nt, synthetic construct
  source 1..21: mol_type = other RNA
gcagccatgcatccactgcag

SEQ ID NO: 3544 - RNA, 21 nt, synthetic construct
  source 1..21: mol_type = other RNA
gcagcgtctccttccccttct

SEQ ID NO: 3545 - RNA, 21 nt, synthetic construct
  source 1..21: mol_type = other RNA
gcagggtgtgagaccctggcc

SEQ ID NO: 3546 - RNA, 21 nt, synthetic construct
  source 1..21: mol_type = other RNA
gcaggtcctcattcagggtga

SEQ ID NO: 3547 - RNA, 21 nt, synthetic construct
  source 1..21: mol_type = other RNA
gcagtggatgcatggctgcga

SEQ ID NO: 3548 - RNA, 21 nt, synthetic construct
  source 1..21: mol_type = other RNA
gcatcatttgacttttgctcg

SEQ ID NO: 3549 - RNA, 21 nt, synthetic construct
  source 1..21: mol_type = other RNA
gcatccactgcagggtgtgag

SEQ ID NO: 3550 - RNA, 21 nt, synthetic construct
  source 1..21: mol_type = other RNA
gcatggctgcgagctggggcc

SEQ ID NO: 3551 - RNA, 21 nt, synthetic construct
  source 1..21: mol_type = other RNA
gcatgtgtcttccaggtaggc

SEQ ID NO: 3552 - RNA, 21 nt, synthetic construct
  source 1..21: mol_type = other RNA
gccactccacgcatgtgtctt

SEQ ID NO: 3553 - RNA, 21 nt, synthetic construct
  source 1..21: mol_type = other RNA
gccagggtctcacaccctgca

SEQ ID NO: 3554 - RNA, 21 nt, synthetic construct
  source 1..21: mol_type = other RNA
gccatgcatccactgcagggt

SEQ ID NO: 3555 - RNA, 21 nt, synthetic construct
  source 1..21: mol_type = other RNA
gcccacagggtggtggcgacg

SEQ ID NO: 3556 - RNA, 21 nt, synthetic construct
  source 1..21: mol_type = other RNA
gccccagctcgcagccatgca

SEQ ID NO: 3557 - RNA, 21 nt, synthetic construct
  source 1..21: mol_type = other RNA
gccccgccccttagtcagtcc

SEQ ID NO: 3558 - RNA, 21 nt, synthetic construct
  source 1..21: mol_type = other RNA
gccccttagtcagtcccgccc

SEQ ID NO: 3559 - RNA, 21 nt, synthetic construct
  source 1..21: mol_type = other RNA
gccctgtggaccctcttaccc

SEQ ID NO: 3560 - RNA, 21 nt, synthetic construct
  source 1..21: mol_type = other RNA
gccgtcgtaggcgaactgttc

SEQ ID NO: 3561 - RNA, 21 nt, synthetic construct
  source 1..21: mol_type = other RNA
gccgtgtccaccgcggtccag

SEQ ID NO: 3562 - RNA, 21 nt, synthetic construct
  source 1..21: mol_type = other RNA
gcctacctggaagacacatgc

SEQ ID NO: 3563 - RNA, 21 nt, synthetic construct
  source 1..21: mol_type = other RNA
gcctacgacggcaaggattat

SEQ ID NO: 3564 - RNA, 21 nt, synthetic construct
  source 1..21: mol_type = other RNA
gcctcagaggcatcatttgac

SEQ ID NO: 3565 - RNA, 21 nt, synthetic construct
  source 1..21: mol_type = other RNA
gcctctgaggcggagcaccag

SEQ ID NO: 3566 - RNA, 21 nt, synthetic construct
  source 1..21: mol_type = other RNA
gcgaactgttcatacccgcgg

SEQ ID NO: 3567 - RNA, 21 nt, synthetic construct
  source 1..21: mol_type = other RNA
gcgcaggtcctcattcagggt

SEQ ID NO: 3568 - RNA, 21 nt, synthetic construct
  source 1..21: mol_type = other RNA
gcgctcctggaccgcggtgga

SEQ ID NO: 3569 - RNA, 21 nt, synthetic construct
  source 1..21: mol_type = other RNA
gcgcttcctccgcgggtatga

SEQ ID NO: 3570 - RNA, 21 nt, synthetic construct
  source 1..21: mol_type = other RNA
gcggagcaccagagagcctac

SEQ ID NO: 3571 - RNA, 21 nt, synthetic construct
  source 1..21: mol_type = other RNA
gcggctcagatctccgagcaa

SEQ ID NO: 3572 - RNA, 21 nt, synthetic construct
  source 1..21: mol_type = other RNA
gcgggactgactaaggggcgg

SEQ ID NO: 3573 - RNA, 21 nt, synthetic construct
  source 1..21: mol_type = other RNA
gcggggccagggtctcacacc

SEQ ID NO: 3574 - RNA, 21 nt, synthetic construct
  source 1..21: mol_type = other RNA
gcgggtatgaacagttcgcct

SEQ ID NO: 3575 - RNA, 21 nt, synthetic construct
  source 1..21: mol_type = other RNA
gcggtccaggagcgcaggtcc

SEQ ID NO: 3576 - RNA, 21 nt, synthetic construct
  source 1..21: mol_type = other RNA
gcggtggacacggcggctcag

SEQ ID NO: 3577 - RNA, 21 nt, synthetic construct
  source 1..21: mol_type = other RNA
gcgtctccttccccttctcca

SEQ ID NO: 3578 - RNA, 21 nt, synthetic construct
  source 1..21: mol_type = other RNA
gcgtggagtggctccacaaat

SEQ ID NO: 3579 - RNA, 21 nt, synthetic construct
  source 1..21: mol_type = other RNA
gctcagatctccgagcaaaag

SEQ ID NO: 3580 - RNA, 21 nt, synthetic construct
  source 1..21: mol_type = other RNA
gctccacaaatacctggagaa

SEQ ID NO: 3581 - RNA, 21 nt, synthetic construct
  source 1..21: mol_type = other RNA
gctccgcctcagaggcatcat

SEQ ID NO: 3582 - RNA, 21 nt, synthetic construct
  source 1..21: mol_type = other RNA
gctcctggaccgcggtggaca

SEQ ID NO: 3583 - RNA, 21 nt, synthetic construct
  source 1..21: mol_type = other RNA
gctcgcagccatgcatccact

SEQ ID NO: 3584 - RNA, 21 nt, synthetic construct
  source 1..21: mol_type = other RNA
gctcggagatctgagccgccg

SEQ ID NO: 3585 - RNA, 21 nt, synthetic construct
  source 1..21: mol_type = other RNA
gctctctggtgctccgcctca

SEQ ID NO: 3586 - RNA, 21 nt, synthetic construct
  source 1..21: mol_type = other RNA
gctgcttcacctgggtaagag

SEQ ID NO: 3587 - RNA, 21 nt, synthetic construct
  source 1..21: mol_type = other RNA
gcttcacctgggtaagagggt

SEQ ID NO: 3588 - RNA, 21 nt, synthetic construct
  source 1..21: mol_type = other RNA
gcttcctccgcgggtatgaac

SEQ ID NO: 3589 - RNA, 21 nt, synthetic construct
  source 1..21: mol_type = other RNA
gcttggtgggcgggactgact

SEQ ID NO: 3590 - RNA, 21 nt, synthetic construct
  source 1..21: mol_type = other RNA
ggaagacacatgcgtggagtg

SEQ ID NO: 3591 - RNA, 21 nt, synthetic construct
  source 1..21: mol_type = other RNA
ggaaggagacgctgcttcacc

SEQ ID NO: 3592 - RNA, 21 nt, synthetic construct
  source 1..21: mol_type = other RNA
ggacacggcggctcagatctc

SEQ ID NO: 3593 - RNA, 21 nt, synthetic construct
  source 1..21: mol_type = other RNA
ggaccctcttacccaggtgaa

SEQ ID NO: 3594 - RNA, 21 nt, synthetic construct
  source 1..21: mol_type = other RNA
ggacctgcgctcctggaccgc

SEQ ID NO: 3595 - RNA, 21 nt, synthetic construct
  source 1..21: mol_type = other RNA
ggactgactaaggggcggggc

SEQ ID NO: 3596 - RNA, 21 nt, synthetic construct
  source 1..21: mol_type = other RNA
ggagaaggggaaggagacgct

SEQ ID NO: 3597 - RNA, 21 nt, synthetic construct
  source 1..21: mol_type = other RNA
ggagacgctgcttcacctggg

SEQ ID NO: 3598 - RNA, 21 nt, synthetic construct
  source 1..21: mol_type = other RNA
ggagagtagccctgtggaccc

SEQ ID NO: 3599 - RNA, 21 nt, synthetic construct
  source 1..21: mol_type = other RNA
ggagatctgagccgccgtgtc

SEQ ID NO: 3600 - RNA, 21 nt, synthetic construct
  source 1..21: mol_type = other RNA
ggagatgggagagtagccctg

SEQ ID NO: 3601 - RNA, 21 nt, synthetic construct
  source 1..21: mol_type = other RNA
ggagcaccagagagcctacct

SEQ ID NO: 3602 - RNA, 21 nt, synthetic construct
  source 1..21: mol_type = other RNA
ggagccactccacgcatgtgt

SEQ ID NO: 3603 - RNA, 21 nt, synthetic construct
  source 1..21: mol_type = other RNA
ggagcgcaggtcctcattcag

SEQ ID NO: 3604 - RNA, 21 nt, synthetic construct
  source 1..21: mol_type = other RNA
ggagtggctccacaaatacct

SEQ ID NO: 3605 - RNA, 21 nt, synthetic construct
  source 1..21: mol_type = other RNA
ggatgcatggctgcgagctgg

SEQ ID NO: 3606 - RNA, 21 nt, synthetic construct
  source 1..21: mol_type = other RNA
ggattatctcaccctgaatga

SEQ ID NO: 3607 - RNA, 21 nt, synthetic construct
  source 1..21: mol_type = other RNA
ggcaaggattatctcaccctg

SEQ ID NO: 3608 - RNA, 21 nt, synthetic construct
  source 1..21: mol_type = other RNA
ggcatcatttgacttttgctc

SEQ ID NO: 3609 - RNA, 21 nt, synthetic construct
  source 1..21: mol_type = other RNA
ggccagggtctcacaccctgc

SEQ ID NO: 3610 - RNA, 21 nt, synthetic construct
  source 1..21: mol_type = other RNA
ggccccagctcgcagccatgc

SEQ ID NO: 3611 - RNA, 21 nt, synthetic construct
  source 1..21: mol_type = other RNA
ggccccgccccttagtcagtc

SEQ ID NO: 3612 - RNA, 21 nt, synthetic construct
  source 1..21: mol_type = other RNA
ggcgaactgttcatacccgcg

SEQ ID NO: 3613 - RNA, 21 nt, synthetic construct
  source 1..21: mol_type = other RNA
ggcgcttcctccgcgggtatg

SEQ ID NO: 3614 - RNA, 21 nt, synthetic construct
  source 1..21: mol_type = other RNA
ggcggagcaccagagagccta

SEQ ID NO: 3615 - RNA, 21 nt, synthetic construct
  source 1..21: mol_type = other RNA
ggcggctcagatctccgagca

SEQ ID NO: 3616 - RNA, 21 nt, synthetic construct
  source 1..21: mol_type = other RNA
ggcgggactgactaaggggcg

SEQ ID NO: 3617 - RNA, 21 nt, synthetic construct
  source 1..21: mol_type = other RNA
ggcggggccagggtctcacac

SEQ ID NO: 3618 - RNA, 21 nt, synthetic construct
  source 1..21: mol_type = other RNA
ggctcagatctccgagcaaaa

SEQ ID NO: 3619 - RNA, 21 nt, synthetic construct
  source 1..21: mol_type = other RNA
ggctccacaaatacctggaga

SEQ ID NO: 3620 - RNA, 21 nt, synthetic construct
  source 1..21: mol_type = other RNA
ggctctctggtgctccgcctc

SEQ ID NO: 3621 - RNA, 21 nt, synthetic construct
  source 1..21: mol_type = other RNA
ggcttggtgggcgggactgac

SEQ ID NO: 3622 - RNA, 21 nt, synthetic construct
  source 1..21: mol_type = other RNA
gggaaggagacgctgcttcac

SEQ ID NO: 3623 - RNA, 21 nt, synthetic construct
  source 1..21: mol_type = other RNA
gggactgactaaggggcgggg

SEQ ID NO: 3624 - RNA, 21 nt, synthetic construct
  source 1..21: mol_type = other RNA
gggagagtagccctgtggacc

SEQ ID NO: 3625 - RNA, 21 nt, synthetic construct
  source 1..21: mol_type = other RNA
gggccagggtctcacaccctg

SEQ ID NO: 3626 - RNA, 21 nt, synthetic construct
  source 1..21: mol_type = other RNA
gggccccagctcgcagccatg

SEQ ID NO: 3627 - RNA, 21 nt, synthetic construct
  source 1..21: mol_type = other RNA
gggcgcttcctccgcgggtat

SEQ ID NO: 3628 - RNA, 21 nt, synthetic construct
  source 1..21: mol_type = other RNA
gggcgggactgactaaggggc

SEQ ID NO: 3629 - RNA, 21 nt, synthetic construct
  source 1..21: mol_type = other RNA
gggcggggccagggtctcaca

SEQ ID NO: 3630 - RNA, 21 nt, synthetic construct
  source 1..21: mol_type = other RNA
gggcttggtgggcgggactga

SEQ ID NO: 3631 - RNA, 21 nt, synthetic construct
  source 1..21: mol_type = other RNA
ggggaaggagacgctgcttca

SEQ ID NO: 3632 - RNA, 21 nt, synthetic construct
  source 1..21: mol_type = other RNA
ggggccagggtctcacaccct

SEQ ID NO: 3633 - RNA, 21 nt, synthetic construct
  source 1..21: mol_type = other RNA
ggggcttggtgggcgggactg

SEQ ID NO: 3634 - RNA, 21 nt, synthetic construct
  source 1..21: mol_type = other RNA
gggtaagagggtccacagggc

SEQ ID NO: 3635 - RNA, 21 nt, synthetic construct
  source 1..21: mol_type = other RNA
gggtatgaacagttcgcctac

SEQ ID NO: 3636 - RNA, 21 nt, synthetic construct
  source 1..21: mol_type = other RNA
gggtccacagggctactctcc

SEQ ID NO: 3637 - RNA, 21 nt, synthetic construct
  source 1..21: mol_type = other RNA
gggtctcacaccctgcagtgg

SEQ ID NO: 3638 - RNA, 21 nt, synthetic construct
  source 1..21: mol_type = other RNA
gggtgagataatccttgccgt

SEQ ID NO: 3639 - RNA, 21 nt, synthetic construct
  source 1..21: mol_type = other RNA
gggtgtgagaccctggccccg

SEQ ID NO: 3640 - RNA, 21 nt, synthetic construct
  source 1..21: mol_type = other RNA
ggtaagagggtccacagggct

SEQ ID NO: 3641 - RNA, 21 nt, synthetic construct
  source 1..21: mol_type = other RNA
ggtaggctctctggtgctccg

SEQ ID NO: 3642 - RNA, 21 nt, synthetic construct
  source 1..21: mol_type = other RNA
ggtatgaacagttcgcctacg

SEQ ID NO: 3643 - RNA, 21 nt, synthetic construct
  source 1..21: mol_type = other RNA
ggtatttgtggagccactcca

SEQ ID NO: 3644 - RNA, 21 nt, synthetic construct
  source 1..21: mol_type = other RNA
ggtccacagggctactctccc

SEQ ID NO: 3645 - RNA, 21 nt, synthetic construct
  source 1..21: mol_type = other RNA
ggtccaggagcgcaggtcctc

SEQ ID NO: 3646 - RNA, 21 nt, synthetic construct
  source 1..21: mol_type = other RNA
ggtcctcattcagggtgagat

SEQ ID NO: 3647 - RNA, 21 nt, synthetic construct
  source 1..21: mol_type = other RNA
ggtctcacaccctgcagtgga

SEQ ID NO: 3648 - RNA, 21 nt, synthetic construct
  source 1..21: mol_type = other RNA
ggtgaagcagcgtctccttcc

SEQ ID NO: 3649 - RNA, 21 nt, synthetic construct
  source 1..21: mol_type = other RNA
ggtgagataatccttgccgtc

SEQ ID NO: 3650 - RNA, 21 nt, synthetic construct
  source 1..21: mol_type = other RNA
ggtgctccgcctcagaggcat

SEQ ID NO: 3651 - RNA, 21 nt, synthetic construct
  source 1..21: mol_type = other RNA
ggtggacacggcggctcagat

SEQ ID NO: 3652 - RNA, 21 nt, synthetic construct
  source 1..21: mol_type = other RNA
ggtgggcgggactgactaagg

SEQ ID NO: 3653 - RNA, 21 nt, synthetic construct
  source 1..21: mol_type = other RNA
ggtgtgagaccctggccccgc

SEQ ID NO: 3654 - RNA, 21 nt, synthetic construct
  source 1..21: mol_type = other RNA
gtaagagggtccacagggcta

SEQ ID NO: 3655 - RNA, 21 nt, synthetic construct
  source 1..21: mol_type = other RNA
gtagccctgtggaccctctta

SEQ ID NO: 3656 - RNA, 21 nt, synthetic construct
  source 1..21: mol_type = other RNA
gtaggcgaactgttcataccc

SEQ ID NO: 3657 - RNA, 21 nt, synthetic construct
  source 1..21: mol_type = other RNA
gtaggctctctggtgctccgc

SEQ ID NO: 3658 - RNA, 21 nt, synthetic construct
  source 1..21: mol_type = other RNA
gtatgaacagttcgcctacga

SEQ ID NO: 3659 - RNA, 21 nt, synthetic construct
  source 1..21: mol_type = other RNA
gtatttgtggagccactccac

SEQ ID NO: 3660 - RNA, 21 nt, synthetic construct
  source 1..21: mol_type = other RNA
gtcaaatgatgcctctgaggc

SEQ ID NO: 3661 - RNA, 21 nt, synthetic construct
  source 1..21: mol_type = other RNA
gtcagtcccgcccaccaagcc

SEQ ID NO: 3662 - RNA, 21 nt, synthetic construct
  source 1..21: mol_type = other RNA
gtccacagggctactctccca

SEQ ID NO: 3663 - RNA, 21 nt, synthetic construct
  source 1..21: mol_type = other RNA
gtccaccgcggtccaggagcg

SEQ ID NO: 3664 - RNA, 21 nt, synthetic construct
  source 1..21: mol_type = other RNA
gtccaggagcgcaggtcctca

SEQ ID NO: 3665 - RNA, 21 nt, synthetic construct
  source 1..21: mol_type = other RNA
gtcctcattcagggtgagata

SEQ ID NO: 3666 - RNA, 21 nt, synthetic construct
  source 1..21: mol_type = other RNA
gtcgtaggcgaactgttcata

SEQ ID NO: 3667 - RNA, 21 nt, synthetic construct
  source 1..21: mol_type = other RNA
gtctcacaccctgcagtggat

SEQ ID NO: 3668 - RNA, 21 nt, synthetic construct
  source 1..21: mol_type = other RNA
gtctccttccccttctccagg

SEQ ID NO: 3669 - RNA, 21 nt, synthetic construct
  source 1..21: mol_type = other RNA
gtcttccaggtaggctctctg

SEQ ID NO: 3670 - RNA, 21 nt, synthetic construct
  source 1..21: mol_type = other RNA
gtgaagcagcgtctccttccc

SEQ ID NO: 3671 - RNA, 21 nt, synthetic construct
  source 1..21: mol_type = other RNA
gtgagataatccttgccgtcg

SEQ ID NO: 3672 - RNA, 21 nt, synthetic construct
  source 1..21: mol_type = other RNA
gtgctccgcctcagaggcatc

SEQ ID NO: 3673 - RNA, 21 nt, synthetic construct
  source 1..21: mol_type = other RNA
gtggacacggcggctcagatc

SEQ ID NO: 3674 - RNA, 21 nt, synthetic construct
  source 1..21: mol_type = other RNA
gtggaccctcttacccaggtg

SEQ ID NO: 3675 - RNA, 21 nt, synthetic construct
  source 1..21: mol_type = other RNA
gtggagccactccacgcatgt

SEQ ID NO: 3676 - RNA, 21 nt, synthetic construct
  source 1..21: mol_type = other RNA
gtggagtggctccacaaatac

SEQ ID NO: 3677 - RNA, 21 nt, synthetic construct
  source 1..21: mol_type = other RNA
gtggatgcatggctgcgagct

SEQ ID NO: 3678 - RNA, 21 nt, synthetic construct
  source 1..21: mol_type = other RNA
gtggctccacaaatacctgga

SEQ ID NO: 3679 - RNA, 21 nt, synthetic construct
  source 1..21: mol_type = other RNA
gtgggcgggactgactaaggg

SEQ ID NO: 3680 - RNA, 21 nt, synthetic construct
  source 1..21: mol_type = other RNA
gtgtccaccgcggtccaggag

SEQ ID NO: 3681 - RNA, 21 nt, synthetic construct
  source 1..21: mol_type = other RNA
gtgtcttccaggtaggctctc

SEQ ID NO: 3682 - RNA, 21 nt, synthetic construct
  source 1..21: mol_type = other RNA
gtgtgagaccctggccccgcc

SEQ ID NO: 3683 - RNA, 21 nt, synthetic construct
  source 1..21: mol_type = other RNA
gttcgcctacgacggcaagga

SEQ ID NO: 3684 - RNA, 21 nt, synthetic construct
  source 1..21: mol_type = other RNA
taagagggtccacagggctac

SEQ ID NO: 3685 - RNA, 21 nt, synthetic construct
  source 1..21: mol_type = other RNA
taaggggcggggccagggtct

SEQ ID NO: 3686 - RNA, 21 nt, synthetic construct
  source 1..21: mol_type = other RNA
taatccttgccgtcgtaggcg

SEQ ID NO: 3687 - RNA, 21 nt, synthetic construct
  source 1..21: mol_type = other RNA
tacccaggtgaagcagcgtct

SEQ ID NO: 3688 - RNA, 21 nt, synthetic construct
  source 1..21: mol_type = other RNA
tacctggaagacacatgcgtg

SEQ ID NO: 3689 - RNA, 21 nt, synthetic construct
  source 1..21: mol_type = other RNA
tacctggagaaggggaaggag

SEQ ID NO: 3690 - RNA, 21 nt, synthetic construct
  source 1..21: mol_type = other RNA
tacgacggcaaggattatctc

SEQ ID NO: 3691 - RNA, 21 nt, synthetic construct
  source 1..21: mol_type = other RNA
tagccctgtggaccctcttac

SEQ ID NO: 3692 - RNA, 21 nt, synthetic construct
  source 1..21: mol_type = other RNA
taggcgaactgttcatacccg

SEQ ID NO: 3693 - RNA, 21 nt, synthetic construct
  source 1..21: mol_type = other RNA
taggctctctggtgctccgcc

SEQ ID NO: 3694 - RNA, 21 nt, synthetic construct
  source 1..21: mol_type = other RNA
tagtcagtcccgcccaccaag

SEQ ID NO: 3695 - RNA, 21 nt, synthetic construct
  source 1..21: mol_type = other RNA
tatctcaccctgaatgaggac

SEQ ID NO: 3696 - RNA, 21 nt, synthetic construct
  source 1..21: mol_type = other RNA
tatgaacagttcgcctacgac

SEQ ID NO: 3697 - RNA, 21 nt, synthetic construct
  source 1..21: mol_type = other RNA
tatttgtggagccactccacg

SEQ ID NO: 3698 - RNA, 21 nt, synthetic construct
  source 1..21: mol_type = other RNA
tcaaatgatgcctctgaggcg

SEQ ID NO: 3699 - RNA, 21 nt, synthetic construct
  source 1..21: mol_type = other RNA
tcacaccctgcagtggatgca

SEQ ID NO: 3700 - RNA, 21 nt, synthetic construct
  source 1..21: mol_type = other RNA
tcaccctgaatgaggacctgc

SEQ ID NO: 3701 - RNA, 21 nt, synthetic construct
  source 1..21: mol_type = other RNA
tcacctgggtaagagggtcca

SEQ ID NO: 3702 - RNA, 21 nt, synthetic construct
  source 1..21: mol_type = other RNA
tcagaggcatcatttgacttt

SEQ ID NO: 3703 - RNA, 21 nt, synthetic construct
  source 1..21: mol_type = other RNA
tcagatctccgagcaaaagtc

SEQ ID NO: 3704 - RNA, 21 nt, synthetic construct
  source 1..21: mol_type = other RNA
tcagggtgagataatccttgc

SEQ ID NO: 3705 - RNA, 21 nt, synthetic construct
  source 1..21: mol_type = other RNA
tcagtcccgcccaccaagccc

SEQ ID NO: 3706 - RNA, 21 nt, synthetic construct
  source 1..21: mol_type = other RNA
tcattcagggtgagataatcc

SEQ ID NO: 3707 - RNA, 21 nt, synthetic construct
  source 1..21: mol_type = other RNA
tcatttgacttttgctcggag

SEQ ID NO: 3708 - RNA, 21 nt, synthetic construct
  source 1..21: mol_type = other RNA
tccacaaatacctggagaagg

SEQ ID NO: 3709 - RNA, 21 nt, synthetic construct
  source 1..21: mol_type = other RNA
tccacagggctactctcccat

SEQ ID NO: 3710 - RNA, 21 nt, synthetic construct
  source 1..21: mol_type = other RNA
tccaccgcggtccaggagcgc

SEQ ID NO: 3711 - RNA, 21 nt, synthetic construct
  source 1..21: mol_type = other RNA
tccacgcatgtgtcttccagg

SEQ ID NO: 3712 - RNA, 21 nt, synthetic construct
  source 1..21: mol_type = other RNA
tccactgcagggtgtgagacc

SEQ ID NO: 3713 - RNA, 21 nt, synthetic construct
  source 1..21: mol_type = other RNA
tccaggagcgcaggtcctcat

SEQ ID NO: 3714 - RNA, 21 nt, synthetic construct
  source 1..21: mol_type = other RNA
tccaggtaggctctctggtgc

SEQ ID NO: 3715 - RNA, 21 nt, synthetic construct
  source 1..21: mol_type = other RNA
tccaggtatttgtggagccac

SEQ ID NO: 3716 - RNA, 21 nt, synthetic construct
  source 1..21: mol_type = other RNA
tccccttctccaggtatttgt

SEQ ID NO: 3717 - RNA, 21 nt, synthetic construct
  source 1..21: mol_type = other RNA
tccgagcaaaagtcaaatgat

SEQ ID NO: 3718 - RNA, 21 nt, synthetic construct
  source 1..21: mol_type = other RNA
tccgcctcagaggcatcattt

SEQ ID NO: 3719 - RNA, 21 nt, synthetic construct
  source 1..21: mol_type = other RNA
tccgcgggtatgaacagttcg

SEQ ID NO: 3720 - RNA, 21 nt, synthetic construct
  source 1..21: mol_type = other RNA
tcctcattcagggtgagataa

SEQ ID NO: 3721 - RNA, 21 nt, synthetic construct
  source 1..21: mol_type = other RNA
tcctccgcgggtatgaacagt

SEQ ID NO: 3722 - RNA, 21 nt, synthetic construct
  source 1..21: mol_type = other RNA
tcctggaccgcggtggacacg

SEQ ID NO: 3723 - RNA, 21 nt, synthetic construct
  source 1..21: mol_type = other RNA
tccttccccttctccaggtat

SEQ ID NO: 3724 - RNA, 21 nt, synthetic construct
  source 1..21: mol_type = other RNA
tccttgccgtcgtaggcgaac

SEQ ID NO: 3725 - RNA, 21 nt, synthetic construct
  source 1..21: mol_type = other RNA
tcgcagccatgcatccactgc

SEQ ID NO: 3726 - RNA, 21 nt, synthetic construct
  source 1..21: mol_type = other RNA
tcgcctacgacggcaaggatt

SEQ ID NO: 3727 - RNA, 21 nt, synthetic construct
  source 1..21: mol_type = other RNA
tcggagatctgagccgccgtg

SEQ ID NO: 3728 - RNA, 21 nt, synthetic construct
  source 1..21: mol_type = other RNA
tcgggccccagctcgcagcca

SEQ ID NO: 3729 - RNA, 21 nt, synthetic construct
  source 1..21: mol_type = other RNA
tcgtaggcgaactgttcatac

SEQ ID NO: 3730 - RNA, 21 nt, synthetic construct
  source 1..21: mol_type = other RNA
tctcacaccctgcagtggatg

SEQ ID NO: 3731 - RNA, 21 nt, synthetic construct
  source 1..21: mol_type = other RNA
tctcaccctgaatgaggacct

SEQ ID NO: 3732 - RNA, 21 nt, synthetic construct
  source 1..21: mol_type = other RNA
tctccaggtatttgtggagcc

SEQ ID NO: 3733 - RNA, 21 nt, synthetic construct
  source 1..21: mol_type = other RNA
tctccgagcaaaagtcaaatg

SEQ ID NO: 3734 - RNA, 21 nt, synthetic construct
  source 1..21: mol_type = other RNA
tctccttccccttctccaggt

SEQ ID NO: 3735 - RNA, 21 nt, synthetic construct
  source 1..21: mol_type = other RNA
tctctggtgctccgcctcaga

SEQ ID NO: 3736 - RNA, 21 nt, synthetic construct
  source 1..21: mol_type = other RNA
tctgagccgccgtgtccaccg

SEQ ID NO: 3737 - RNA, 21 nt, synthetic construct
  source 1..21: mol_type = other RNA
tctgaggcggagcaccagaga

SEQ ID NO: 3738 - RNA, 21 nt, synthetic construct
  source 1..21: mol_type = other RNA
tctggtgctccgcctcagagg

SEQ ID NO: 3739 - RNA, 21 nt, synthetic construct
  source 1..21: mol_type = other RNA
tcttacccaggtgaagcagcg

SEQ ID NO: 3740 - RNA, 21 nt, synthetic construct
  source 1..21: mol_type = other RNA
tcttccaggtaggctctctgg

SEQ ID NO: 3741 - RNA, 21 nt, synthetic construct
  source 1..21: mol_type = other RNA
tgaacagttcgcctacgacgg

SEQ ID NO: 3742 - RNA, 21 nt, synthetic construct
  source 1..21: mol_type = other RNA
tgaagcagcgtctccttcccc

SEQ ID NO: 3743 - RNA, 21 nt, synthetic construct
  source 1..21: mol_type = other RNA
tgaatgaggacctgcgctcct

SEQ ID NO: 3744 - RNA, 21 nt, synthetic construct
  source 1..21: mol_type = other RNA
tgactaaggggcggggccagg

SEQ ID NO: 3745 - RNA, 21 nt, synthetic construct
  source 1..21: mol_type = other RNA
tgacttttgctcggagatctg

SEQ ID NO: 3746 - RNA, 21 nt, synthetic construct
  source 1..21: mol_type = other RNA
tgagaccctggccccgcccct

SEQ ID NO: 3747 - RNA, 21 nt, synthetic construct
  source 1..21: mol_type = other RNA
tgagataatccttgccgtcgt

SEQ ID NO: 3748 - RNA, 21 nt, synthetic construct
  source 1..21: mol_type = other RNA
tgagccgccgtgtccaccgcg

SEQ ID NO: 3749 - RNA, 21 nt, synthetic construct
  source 1..21: mol_type = other RNA
tgaggacctgcgctcctggac

SEQ ID NO: 3750 - RNA, 21 nt, synthetic construct
  source 1..21: mol_type = other RNA
tgaggcggagcaccagagagc

SEQ ID NO: 3751 - RNA, 21 nt, synthetic construct
  source 1..21: mol_type = other RNA
tgatgcctctgaggcggagca

SEQ ID NO: 3752 - RNA, 21 nt, synthetic construct
  source 1..21: mol_type = other RNA
tgcagggtgtgagaccctggc

SEQ ID NO: 3753 - RNA, 21 nt, synthetic construct
  source 1..21: mol_type = other RNA
tgcagtggatgcatggctgcg

SEQ ID NO: 3754 - RNA, 21 nt, synthetic construct
  source 1..21: mol_type = other RNA
tgcatccactgcagggtgtga

SEQ ID NO: 3755 - RNA, 21 nt, synthetic construct
  source 1..21: mol_type = other RNA
tgcatggctgcgagctggggc

SEQ ID NO: 3756 - RNA, 21 nt, synthetic construct
  source 1..21: mol_type = other RNA
tgcccacagggtggtggcgac

SEQ ID NO: 3757 - RNA, 21 nt, synthetic construct
  source 1..21: mol_type = other RNA
tgccgtcgtaggcgaactgtt

SEQ ID NO: 3758 - RNA, 21 nt, synthetic construct
  source 1..21: mol_type = other RNA
tgcctctgaggcggagcacca

SEQ ID NO: 3759 - RNA, 21 nt, synthetic construct
  source 1..21: mol_type = other RNA
tgcgctcctggaccgcggtgg

SEQ ID NO: 3760 - RNA, 21 nt, synthetic construct
  source 1..21: mol_type = other RNA
tgcgtggagtggctccacaaa

SEQ ID NO: 3761 - RNA, 21 nt, synthetic construct
  source 1..21: mol_type = other RNA
tgctccgcctcagaggcatca

SEQ ID NO: 3762 - RNA, 21 nt, synthetic construct
  source 1..21: mol_type = other RNA
tgctcggagatctgagccgcc

SEQ ID NO: 3763 - RNA, 21 nt, synthetic construct
  source 1..21: mol_type = other RNA
tgcttcacctgggtaagaggg

SEQ ID NO: 3764 - RNA, 21 nt, synthetic construct
  source 1..21: mol_type = other RNA
tggaagacacatgcgtggagt

SEQ ID NO: 3765 - RNA, 21 nt, synthetic construct
  source 1..21: mol_type = other RNA
tggacacggcggctcagatct

SEQ ID NO: 3766 - RNA, 21 nt, synthetic construct
  source 1..21: mol_type = other RNA
tggaccctcttacccaggtga

SEQ ID NO: 3767 - RNA, 21 nt, synthetic construct
  source 1..21: mol_type = other RNA
tggaccgcggtggacacggcg

SEQ ID NO: 3768 - RNA, 21 nt, synthetic construct
  source 1..21: mol_type = other RNA
tggagaaggggaaggagacgc

SEQ ID NO: 3769 - RNA, 21 nt, synthetic construct
  source 1..21: mol_type = other RNA
tggagccactccacgcatgtg

SEQ ID NO: 3770 - RNA, 21 nt, synthetic construct
  source 1..21: mol_type = other RNA
tggagtggctccacaaatacc

SEQ ID NO: 3771 - RNA, 21 nt, synthetic construct
  source 1..21: mol_type = other RNA
tggatgcatggctgcgagctg

SEQ ID NO: 3772 - RNA, 21 nt, synthetic construct
  source 1..21: mol_type = other RNA
tggccccgccccttagtcagt

SEQ ID NO: 3773 - RNA, 21 nt, synthetic construct
  source 1..21: mol_type = other RNA
tggctccacaaatacctggag

SEQ ID NO: 3774 - RNA, 21 nt, synthetic construct
  source 1..21: mol_type = other RNA
tggctgcgagctggggcccga

SEQ ID NO: 3775 - RNA, 21 nt, synthetic construct
  source 1..21: mol_type = other RNA
tgggagagtagccctgtggac

SEQ ID NO: 3776 - RNA, 21 nt, synthetic construct
  source 1..21: mol_type = other RNA
tgggcgggactgactaagggg

SEQ ID NO: 3777 - RNA, 21 nt, synthetic construct
  source 1..21: mol_type = other RNA
tgggtaagagggtccacaggg

SEQ ID NO: 3778 - RNA, 21 nt, synthetic construct
  source 1..21: mol_type = other RNA
tggtgctccgcctcagaggca

SEQ ID NO: 3779 - RNA, 21 nt, synthetic construct
  source 1..21: mol_type = other RNA
tggtgggcgggactgactaag

SEQ ID NO: 3780 - RNA, 21 nt, synthetic construct
  source 1..21: mol_type = other RNA
tgtccaccgcggtccaggagc

SEQ ID NO: 3781 - RNA, 21 nt, synthetic construct
  source 1..21: mol_type = other RNA
tgtcttccaggtaggctctct

SEQ ID NO: 3782 - RNA, 21 nt, synthetic construct
  source 1..21: mol_type = other RNA
tgtgagaccctggccccgccc

SEQ ID NO: 3783 - RNA, 21 nt, synthetic construct
  source 1..21: mol_type = other RNA
tgtggaccctcttacccaggt

SEQ ID NO: 3784 - RNA, 21 nt, synthetic construct
  source 1..21: mol_type = other RNA
tgtggagccactccacgcatg

SEQ ID NO: 3785 - RNA, 21 nt, synthetic construct
  source 1..21: mol_type = other RNA
tgtgtcttccaggtaggctct

SEQ ID NO: 3786 - RNA, 21 nt, synthetic construct
  source 1..21: mol_type = other RNA
ttacccaggtgaagcagcgtc

SEQ ID NO: 3787 - RNA, 21 nt, synthetic construct
  source 1..21: mol_type = other RNA
ttagtcagtcccgcccaccaa

SEQ ID NO: 3788 - RNA, 21 nt, synthetic construct
  source 1..21: mol_type = other RNA
ttatctcaccctgaatgagga

SEQ ID NO: 3789 - RNA, 21 nt, synthetic construct
  source 1..21: mol_type = other RNA
ttcacctgggtaagagggtcc

SEQ ID NO: 3790 - RNA, 21 nt, synthetic construct
  source 1..21: mol_type = other RNA
ttcagggtgagataatccttg

SEQ ID NO: 3791 - RNA, 21 nt, synthetic construct
  source 1..21: mol_type = other RNA
ttccaggtaggctctctggtg

SEQ ID NO: 3792 - RNA, 21 nt, synthetic construct
  source 1..21: mol_type = other RNA
ttccccttctccaggtatttg

SEQ ID NO: 3793 - RNA, 21 nt, synthetic construct
  source 1..21: mol_type = other RNA
ttcctccgcgggtatgaacag

SEQ ID NO: 3794 - RNA, 21 nt, synthetic construct
  source 1..21: mol_type = other RNA
ttcgcctacgacggcaaggat

SEQ ID NO: 3795 - RNA, 21 nt, synthetic construct
  source 1..21: mol_type = other RNA
ttctccaggtatttgtggagc

SEQ ID NO: 3796 - RNA, 21 nt, synthetic construct
  source 1..21: mol_type = other RNA
ttgacttttgctcggagatct

SEQ ID NO: 3797 - RNA, 21 nt, synthetic construct
  source 1..21: mol_type = other RNA
ttgccgtcgtaggcgaactgt

SEQ ID NO: 3798 - RNA, 21 nt, synthetic construct
  source 1..21: mol_type = other RNA
ttgctcggagatctgagccgc

SEQ ID NO: 3799 - RNA, 21 nt, synthetic construct
  source 1..21: mol_type = other RNA
ttggtgggcgggactgactaa

SEQ ID NO: 3800 - RNA, 21 nt, synthetic construct
  source 1..21: mol_type = other RNA
ttgtggagccactccacgcat

SEQ ID NO: 3801 - RNA, 21 nt, synthetic construct
  source 1..21: mol_type = other RNA
tttgacttttgctcggagatc

SEQ ID NO: 3802 - RNA, 21 nt, synthetic construct
  source 1..21: mol_type = other RNA
tttgctcggagatctgagccg

SEQ ID NO: 3803 - RNA, 21 nt, synthetic construct
  source 1..21: mol_type = other RNA
tttgtggagccactccacgca

SEQ ID NO: 3804 - RNA, 21 nt, synthetic construct
  source 1..21: mol_type = other RNA
ttttgctcggagatctgagcc

SEQ ID NO: 3805 - RNA, 22 nt, synthetic construct
  source 1..22: mol_type = other RNA
aaaagtcaaatgatgcctctga

SEQ ID NO: 3806 - RNA, 22 nt, synthetic construct
  source 1..22: mol_type = other RNA
aaaatgcccacagggtggtggc

SEQ ID NO: 3807 - RNA, 22 nt, synthetic construct
  source 1..22: mol_type = other RNA
aaagtcaaatgatgcctctgag

SEQ ID NO: 3808 - RNA, 22 nt, synthetic construct
  source 1..22: mol_type = other RNA
aaatacctggagaaggggaagg

SEQ ID NO: 3809 - RNA, 22 nt, synthetic construct
  source 1..22: mol_type = other RNA
aaatgatgcctctgaggcggag

SEQ ID NO: 3810 - RNA, 22 nt, synthetic construct
  source 1..22: mol_type = other RNA
aaatgcccacagggtggtggcg

SEQ ID NO: 3811 - RNA, 22 nt, synthetic construct
  source 1..22: mol_type = other RNA
aacagttcgcctacgacggcaa

SEQ ID NO: 3812 - RNA, 22 nt, synthetic construct
  source 1..22: mol_type = other RNA
aactgttcatacccgcggagga

SEQ ID NO: 3813 - RNA, 22 nt, synthetic construct
  source 1..22: mol_type = other RNA
aagacacatgcgtggagtggct

SEQ ID NO: 3814 - RNA, 22 nt, synthetic construct
  source 1..22: mol_type = other RNA
aagagggtccacagggctactc

SEQ ID NO: 3815 - RNA, 22 nt, synthetic construct
  source 1..22: mol_type = other RNA
aagcagcgtctccttccccttc

SEQ ID NO: 3816 - RNA, 22 nt, synthetic construct
  source 1..22: mol_type = other RNA
aagcgcccgtcgggccccagct

SEQ ID NO: 3817 - RNA, 22 nt, synthetic construct
  source 1..22: mol_type = other RNA
aaggagacgctgcttcacctgg

SEQ ID NO: 3818 - RNA, 22 nt, synthetic construct
  source 1..22: mol_type = other RNA
aaggagatgggagagtagccct

SEQ ID NO: 3819 - RNA, 22 nt, synthetic construct
  source 1..22: mol_type = other RNA
aaggattatctcaccctgaatg

SEQ ID NO: 3820 - RNA, 22 nt, synthetic construct
  source 1..22: mol_type = other RNA
aaggggaaggagacgctgcttc

SEQ ID NO: 3821 - RNA, 22 nt, synthetic construct
  source 1..22: mol_type = other RNA
aaggggcggggccagggtctca

SEQ ID NO: 3822 - RNA, 22 nt, synthetic construct
  source 1..22: mol_type = other RNA
aagtcaaatgatgcctctgagg

SEQ ID NO: 3823 - RNA, 22 nt, synthetic construct
  source 1..22: mol_type = other RNA
aatacctggagaaggggaagga

SEQ ID NO: 3824 - RNA, 22 nt, synthetic construct
  source 1..22: mol_type = other RNA
aatccttgccgtcgtaggcgaa

SEQ ID NO: 3825 - RNA, 22 nt, synthetic construct
  source 1..22: mol_type = other RNA
aatgaggacctgcgctcctgga

SEQ ID NO: 3826 - RNA, 22 nt, synthetic construct
  source 1..22: mol_type = other RNA
aatgatgcctctgaggcggagc

SEQ ID NO: 3827 - RNA, 22 nt, synthetic construct
  source 1..22: mol_type = other RNA
aatgcccacagggtggtggcga

SEQ ID NO: 3828 - RNA, 22 nt, synthetic construct
  source 1..22: mol_type = other RNA
acaaatacctggagaaggggaa

SEQ ID NO: 3829 - RNA, 22 nt, synthetic construct
  source 1..22: mol_type = other RNA
acacatgcgtggagtggctcca

SEQ ID NO: 3830 - RNA, 22 nt, synthetic construct
  source 1..22: mol_type = other RNA
acaccctgcagtggatgcatgg

SEQ ID NO: 3831 - RNA, 22 nt, synthetic construct
  source 1..22: mol_type = other RNA
acacggcggctcagatctccga

SEQ ID NO: 3832 - RNA, 22 nt, synthetic construct
  source 1..22: mol_type = other RNA
acagggtggtggcgacgggggc

SEQ ID NO: 3833 - RNA, 22 nt, synthetic construct
  source 1..22: mol_type = other RNA
acagttcgcctacgacggcaag

SEQ ID NO: 3834 - RNA, 22 nt, synthetic construct
  source 1..22: mol_type = other RNA
acatgcgtggagtggctccaca

SEQ ID NO: 3835 - RNA, 22 nt, synthetic construct
  source 1..22: mol_type = other RNA
accagagagcctacctggaaga

SEQ ID NO: 3836 - RNA, 22 nt, synthetic construct
  source 1..22: mol_type = other RNA
acccaggtgaagcagcgtctcc

SEQ ID NO: 3837 - RNA, 22 nt, synthetic construct
  source 1..22: mol_type = other RNA
accctcttacccaggtgaagca

SEQ ID NO: 3838 - RNA, 22 nt, synthetic construct
  source 1..22: mol_type = other RNA
accctgaatgaggacctgcgct

SEQ ID NO: 3839 - RNA, 22 nt, synthetic construct
  source 1..22: mol_type = other RNA
accctgcagtggatgcatggct

SEQ ID NO: 3840 - RNA, 22 nt, synthetic construct
  source 1..22: mol_type = other RNA
accctggccccgccccttagtc

SEQ ID NO: 3841 - RNA, 22 nt, synthetic construct
  source 1..22: mol_type = other RNA
accgcggtccaggagcgcaggt

SEQ ID NO: 3842 - RNA, 22 nt, synthetic construct
  source 1..22: mol_type = other RNA
accgcggtggacacggcggctc

SEQ ID NO: 3843 - RNA, 22 nt, synthetic construct
  source 1..22: mol_type = other RNA
acctgcgctcctggaccgcggt

SEQ ID NO: 3844 - RNA, 22 nt, synthetic construct
  source 1..22: mol_type = other RNA
acctggaagacacatgcgtgga

SEQ ID NO: 3845 - RNA, 22 nt, synthetic construct
  source 1..22: mol_type = other RNA
acctggagaaggggaaggagac

SEQ ID NO: 3846 - RNA, 22 nt, synthetic construct
  source 1..22: mol_type = other RNA
acctgggtaagagggtccacag

SEQ ID NO: 3847 - RNA, 22 nt, synthetic construct
  source 1..22: mol_type = other RNA
acgacggcaaggattatctcac

SEQ ID NO: 3848 - RNA, 22 nt, synthetic construct
  source 1..22: mol_type = other RNA
acgcatgtgtcttccaggtagg

SEQ ID NO: 3849 - RNA, 22 nt, synthetic construct
  source 1..22: mol_type = other RNA
acgctgcttcacctgggtaaga

SEQ ID NO: 3850 - RNA, 22 nt, synthetic construct
  source 1..22: mol_type = other RNA
acggcaaggattatctcaccct

SEQ ID NO: 3851 - RNA, 22 nt, synthetic construct
  source 1..22: mol_type = other RNA
acggcggctcagatctccgagc

SEQ ID NO: 3852 - RNA, 22 nt, synthetic construct
  source 1..22: mol_type = other RNA
acgggcgcttcctccgcgggta

SEQ ID NO: 3853 - RNA, 22 nt, synthetic construct
  source 1..22: mol_type = other RNA
actaaggggcggggccagggtc

SEQ ID NO: 3854 - RNA, 22 nt, synthetic construct
  source 1..22: mol_type = other RNA
actccacgcatgtgtcttccag

SEQ ID NO: 3855 - RNA, 22 nt, synthetic construct
  source 1..22: mol_type = other RNA
actgactaaggggcggggccag

SEQ ID NO: 3856 - RNA, 22 nt, synthetic construct
  source 1..22: mol_type = other RNA
actgcagggtgtgagaccctgg

SEQ ID NO: 3857 - RNA, 22 nt, synthetic construct
  source 1..22: mol_type = other RNA
actgttcatacccgcggaggaa

SEQ ID NO: 3858 - RNA, 22 nt, synthetic construct
  source 1..22: mol_type = other RNA
acttttgctcggagatctgagc

SEQ ID NO: 3859 - RNA, 22 nt, synthetic construct
  source 1..22: mol_type = other RNA
agaaggagatgggagagtagcc

SEQ ID NO: 3860 - RNA, 22 nt, synthetic construct
  source 1..22: mol_type = other RNA
agaaggggaaggagacgctgct

SEQ ID NO: 3861 - RNA, 22 nt, synthetic construct
  source 1..22: mol_type = other RNA
agacacatgcgtggagtggctc

SEQ ID NO: 3862 - RNA, 22 nt, synthetic construct
  source 1..22: mol_type = other RNA
agaccctggccccgccccttag

SEQ ID NO: 3863 - RNA, 22 nt, synthetic construct
  source 1..22: mol_type = other RNA
agacgctgcttcacctgggtaa

SEQ ID NO: 3864 - RNA, 22 nt, synthetic construct
  source 1..22: mol_type = other RNA
agagagcctacctggaagacac

SEQ ID NO: 3865 - RNA, 22 nt, synthetic construct
  source 1..22: mol_type = other RNA
agagcctacctggaagacacat

SEQ ID NO: 3866 - RNA, 22 nt, synthetic construct
  source 1..22: mol_type = other RNA
agaggcatcatttgacttttgc

SEQ ID NO: 3867 - RNA, 22 nt, synthetic construct
  source 1..22: mol_type = other RNA
agagggtccacagggctactct

SEQ ID NO: 3868 - RNA, 22 nt, synthetic construct
  source 1..22: mol_type = other RNA
agagtagccctgtggaccctct

SEQ ID NO: 3869 - RNA, 22 nt, synthetic construct
  source 1..22: mol_type = other RNA
agataatccttgccgtcgtagg

SEQ ID NO: 3870 - RNA, 22 nt, synthetic construct
  source 1..22: mol_type = other RNA
agatctccgagcaaaagtcaaa

SEQ ID NO: 3871 - RNA, 22 nt, synthetic construct
  source 1..22: mol_type = other RNA
agatctgagccgccgtgtccac

SEQ ID NO: 3872 - RNA, 22 nt, synthetic construct
  source 1..22: mol_type = other RNA
agatgggagagtagccctgtgg

SEQ ID NO: 3873 - RNA, 22 nt, synthetic construct
  source 1..22: mol_type = other RNA
agcaaaagtcaaatgatgcctc

SEQ ID NO: 3874 - RNA, 22 nt, synthetic construct
  source 1..22: mol_type = other RNA
agcaccagagagcctacctgga

SEQ ID NO: 3875 - RNA, 22 nt, synthetic construct
  source 1..22: mol_type = other RNA
agcagcgtctccttccccttct

SEQ ID NO: 3876 - RNA, 22 nt, synthetic construct
  source 1..22: mol_type = other RNA
agccactccacgcatgtgtctt

SEQ ID NO: 3877 - RNA, 22 nt, synthetic construct
  source 1..22: mol_type = other RNA
agccatgcatccactgcagggt

SEQ ID NO: 3878 - RNA, 22 nt, synthetic construct
  source 1..22: mol_type = other RNA
agccctgtggaccctcttaccc

SEQ ID NO: 3879 - RNA, 22 nt, synthetic construct
  source 1..22: mol_type = other RNA
agccgccgtgtccaccgcggtc

SEQ ID NO: 3880 - RNA, 22 nt, synthetic construct
  source 1..22: mol_type = other RNA
agcctacctggaagacacatgc

SEQ ID NO: 3881 - RNA, 22 nt, synthetic construct
  source 1..22: mol_type = other RNA
agcgcaggtcctcattcagggt

SEQ ID NO: 3882 - RNA, 22 nt, synthetic construct
  source 1..22: mol_type = other RNA
agcgtctccttccccttctcca

SEQ ID NO: 3883 - RNA, 22 nt, synthetic construct
  source 1..22: mol_type = other RNA
agctcgcagccatgcatccact

SEQ ID NO: 3884 - RNA, 22 nt, synthetic construct
  source 1..22: mol_type = other RNA
agctggggcccgacgggcgctt

SEQ ID NO: 3885 - RNA, 22 nt, synthetic construct
  source 1..22: mol_type = other RNA
aggaagcgcccgtcgggcccca

SEQ ID NO: 3886 - RNA, 22 nt, synthetic construct
  source 1..22: mol_type = other RNA
aggacctgcgctcctggaccgc

SEQ ID NO: 3887 - RNA, 22 nt, synthetic construct
  source 1..22: mol_type = other RNA
aggagacgctgcttcacctggg

SEQ ID NO: 3888 - RNA, 22 nt, synthetic construct
  source 1..22: mol_type = other RNA
aggagatgggagagtagccctg

SEQ ID NO: 3889 - RNA, 22 nt, synthetic construct
  source 1..22: mol_type = other RNA
aggagcgcaggtcctcattcag

SEQ ID NO: 3890 - RNA, 22 nt, synthetic construct
  source 1..22: mol_type = other RNA
aggattatctcaccctgaatga

SEQ ID NO: 3891 - RNA, 22 nt, synthetic construct
  source 1..22: mol_type = other RNA
aggcatcatttgacttttgctc

SEQ ID NO: 3892 - RNA, 22 nt, synthetic construct
  source 1..22: mol_type = other RNA
aggcgaactgttcatacccgcg

SEQ ID NO: 3893 - RNA, 22 nt, synthetic construct
  source 1..22: mol_type = other RNA
aggcggagcaccagagagccta

SEQ ID NO: 3894 - RNA, 22 nt, synthetic construct
  source 1..22: mol_type = other RNA
aggctctctggtgctccgcctc

SEQ ID NO: 3895 - RNA, 22 nt, synthetic construct
  source 1..22: mol_type = other RNA
aggggaaggagacgctgcttca

SEQ ID NO: 3896 - RNA, 22 nt, synthetic construct
  source 1..22: mol_type = other RNA
aggggcggggccagggtctcac

SEQ ID NO: 3897 - RNA, 22 nt, synthetic construct
  source 1..22: mol_type = other RNA
agggtccacagggctactctcc

SEQ ID NO: 3898 - RNA, 22 nt, synthetic construct
  source 1..22: mol_type = other RNA
agggtctcacaccctgcagtgg

SEQ ID NO: 3899 - RNA, 22 nt, synthetic construct
  source 1..22: mol_type = other RNA
agggtgagataatccttgccgt

SEQ ID NO: 3900 - RNA, 22 nt, synthetic construct
  source 1..22: mol_type = other RNA
agggtgtgagaccctggccccg

SEQ ID NO: 3901 - RNA, 22 nt, synthetic construct
  source 1..22: mol_type = other RNA
aggtaggctctctggtgctccg

SEQ ID NO: 3902 - RNA, 22 nt, synthetic construct
  source 1..22: mol_type = other RNA
aggtatttgtggagccactcca

SEQ ID NO: 3903 - RNA, 22 nt, synthetic construct
  source 1..22: mol_type = other RNA
aggtcctcattcagggtgagat

SEQ ID NO: 3904 - RNA, 22 nt, synthetic construct
  source 1..22: mol_type = other RNA
aggtgaagcagcgtctccttcc

SEQ ID NO: 3905 - RNA, 22 nt, synthetic construct
  source 1..22: mol_type = other RNA
agtagccctgtggaccctctta

SEQ ID NO: 3906 - RNA, 22 nt, synthetic construct
  source 1..22: mol_type = other RNA
agtcaaatgatgcctctgaggc

SEQ ID NO: 3907 - RNA, 22 nt, synthetic construct
  source 1..22: mol_type = other RNA
agtcagtcccgcccaccaagcc

SEQ ID NO: 3908 - RNA, 22 nt, synthetic construct
  source 1..22: mol_type = other RNA
agtcccgcccaccaagccccgc

SEQ ID NO: 3909 - RNA, 22 nt, synthetic construct
  source 1..22: mol_type = other RNA
agtggatgcatggctgcgagct

SEQ ID NO: 3910 - RNA, 22 nt, synthetic construct
  source 1..22: mol_type = other RNA
agtggctccacaaatacctgga

SEQ ID NO: 3911 - RNA, 22 nt, synthetic construct
  source 1..22: mol_type = other RNA
agttcgcctacgacggcaagga

SEQ ID NO: 3912 - RNA, 22 nt, synthetic construct
  source 1..22: mol_type = other RNA
ataatccttgccgtcgtaggcg

SEQ ID NO: 3913 - RNA, 22 nt, synthetic construct
  source 1..22: mol_type = other RNA
atacctggagaaggggaaggag

SEQ ID NO: 3914 - RNA, 22 nt, synthetic construct
  source 1..22: mol_type = other RNA
atcatttgacttttgctcggag

SEQ ID NO: 3915 - RNA, 22 nt, synthetic construct
  source 1..22: mol_type = other RNA
atccactgcagggtgtgagacc

SEQ ID NO: 3916 - RNA, 22 nt, synthetic construct
  source 1..22: mol_type = other RNA
atccttgccgtcgtaggcgaac

SEQ ID NO: 3917 - RNA, 22 nt, synthetic construct
  source 1..22: mol_type = other RNA
atctcaccctgaatgaggacct

SEQ ID NO: 3918 - RNA, 22 nt, synthetic construct
  source 1..22: mol_type = other RNA
atctccgagcaaaagtcaaatg

SEQ ID NO: 3919 - RNA, 22 nt, synthetic construct
  source 1..22: mol_type = other RNA
atctgagccgccgtgtccaccg

SEQ ID NO: 3920 - RNA, 22 nt, synthetic construct
  source 1..22: mol_type = other RNA
atgaacagttcgcctacgacgg

SEQ ID NO: 3921 - RNA, 22 nt, synthetic construct
  source 1..22: mol_type = other RNA
atgaggacctgcgctcctggac

SEQ ID NO: 3922 - RNA, 22 nt, synthetic construct
  source 1..22: mol_type = other RNA
atgatgcctctgaggcggagca

SEQ ID NO: 3923 - RNA, 22 nt, synthetic construct
  source 1..22: mol_type = other RNA
atgcatccactgcagggtgtga

SEQ ID NO: 3924 - RNA, 22 nt, synthetic construct
  source 1..22: mol_type = other RNA
atgcatggctgcgagctggggc

SEQ ID NO: 3925 - RNA, 22 nt, synthetic construct
  source 1..22: mol_type = other RNA
atgcccacagggtggtggcgac

SEQ ID NO: 3926 - RNA, 22 nt, synthetic construct
  source 1..22: mol_type = other RNA
atgcctctgaggcggagcacca

SEQ ID NO: 3927 - RNA, 22 nt, synthetic construct
  source 1..22: mol_type = other RNA
atgcgtggagtggctccacaaa

SEQ ID NO: 3928 - RNA, 22 nt, synthetic construct
  source 1..22: mol_type = other RNA
atggctgcgagctggggcccga

SEQ ID NO: 3929 - RNA, 22 nt, synthetic construct
  source 1..22: mol_type = other RNA
atgggagagtagccctgtggac

SEQ ID NO: 3930 - RNA, 22 nt, synthetic construct
  source 1..22: mol_type = other RNA
atgtgtcttccaggtaggctct

SEQ ID NO: 3931 - RNA, 22 nt, synthetic construct
  source 1..22: mol_type = other RNA
attatctcaccctgaatgagga

SEQ ID NO: 3932 - RNA, 22 nt, synthetic construct
  source 1..22: mol_type = other RNA
attcagggtgagataatccttg

SEQ ID NO: 3933 - RNA, 22 nt, synthetic construct
  source 1..22: mol_type = other RNA
atttgacttttgctcggagatc

SEQ ID NO: 3934 - RNA, 22 nt, synthetic construct
  source 1..22: mol_type = other RNA
atttgtggagccactccacgca

SEQ ID NO: 3935 - RNA, 22 nt, synthetic construct
  source 1..22: mol_type = other RNA
caaaagtcaaatgatgcctctg

SEQ ID NO: 3936 - RNA, 22 nt, synthetic construct
  source 1..22: mol_type = other RNA
caaatacctggagaaggggaag

SEQ ID NO: 3937 - RNA, 22 nt, synthetic construct
  source 1..22: mol_type = other RNA
caaatgatgcctctgaggcgga

SEQ ID NO: 3938 - RNA, 22 nt, synthetic construct
  source 1..22: mol_type = other RNA
caaggattatctcaccctgaat

SEQ ID NO: 3939 - RNA, 22 nt, synthetic construct
  source 1..22: mol_type = other RNA
cacaaatacctggagaagggga

SEQ ID NO: 3940 - RNA, 22 nt, synthetic construct
  source 1..22: mol_type = other RNA
cacaccctgcagtggatgcatg

SEQ ID NO: 3941 - RNA, 22 nt, synthetic construct
  source 1..22: mol_type = other RNA
cacagggtggtggcgacggggg

SEQ ID NO: 3942 - RNA, 22 nt, synthetic construct
  source 1..22: mol_type = other RNA
cacatgcgtggagtggctccac

SEQ ID NO: 3943 - RNA, 22 nt, synthetic construct
  source 1..22: mol_type = other RNA
caccagagagcctacctggaag

SEQ ID NO: 3944 - RNA, 22 nt, synthetic construct
  source 1..22: mol_type = other RNA
caccctgaatgaggacctgcgc

SEQ ID NO: 3945 - RNA, 22 nt, synthetic construct
  source 1..22: mol_type = other RNA
caccctgcagtggatgcatggc

SEQ ID NO: 3946 - RNA, 22 nt, synthetic construct
  source 1..22: mol_type = other RNA
caccgcggtccaggagcgcagg

SEQ ID NO: 3947 - RNA, 22 nt, synthetic construct
  source 1..22: mol_type = other RNA
cacctgggtaagagggtccaca

SEQ ID NO: 3948 - RNA, 22 nt, synthetic construct
  source 1..22: mol_type = other RNA
cacgcatgtgtcttccaggtag

SEQ ID NO: 3949 - RNA, 22 nt, synthetic construct
  source 1..22: mol_type = other RNA
cacggcggctcagatctccgag

SEQ ID NO: 3950 - RNA, 22 nt, synthetic construct
  source 1..22: mol_type = other RNA
cactccacgcatgtgtcttcca

SEQ ID NO: 3951 - RNA, 22 nt, synthetic construct
  source 1..22: mol_type = other RNA
cactgcagggtgtgagaccctg

SEQ ID NO: 3952 - RNA, 22 nt, synthetic construct
  source 1..22: mol_type = other RNA
cagagagcctacctggaagaca

SEQ ID NO: 3953 - RNA, 22 nt, synthetic construct
  source 1..22: mol_type = other RNA
cagaggcatcatttgacttttg

SEQ ID NO: 3954 - RNA, 22 nt, synthetic construct
  source 1..22: mol_type = other RNA
cagatctccgagcaaaagtcaa

SEQ ID NO: 3955 - RNA, 22 nt, synthetic construct
  source 1..22: mol_type = other RNA
cagccatgcatccactgcaggg

SEQ ID NO: 3956 - RNA, 22 nt, synthetic construct
  source 1..22: mol_type = other RNA
cagcgtctccttccccttctcc

SEQ ID NO: 3957 - RNA, 22 nt, synthetic construct
  source 1..22: mol_type = other RNA
cagctcgcagccatgcatccac

SEQ ID NO: 3958 - RNA, 22 nt, synthetic construct
  source 1..22: mol_type = other RNA
caggagcgcaggtcctcattca

SEQ ID NO: 3959 - RNA, 22 nt, synthetic construct
  source 1..22: mol_type = other RNA
cagggtctcacaccctgcagtg

SEQ ID NO: 3960 - RNA, 22 nt, synthetic construct
  source 1..22: mol_type = other RNA
cagggtgagataatccttgccg

SEQ ID NO: 3961 - RNA, 22 nt, synthetic construct
  source 1..22: mol_type = other RNA
cagggtgtgagaccctggcccc

SEQ ID NO: 3962 - RNA, 22 nt, synthetic construct
  source 1..22: mol_type = other RNA
caggtaggctctctggtgctcc

SEQ ID NO: 3963 - RNA, 22 nt, synthetic construct
  source 1..22: mol_type = other RNA
caggtatttgtggagccactcc

SEQ ID NO: 3964 - RNA, 22 nt, synthetic construct
  source 1..22: mol_type = other RNA
caggtcctcattcagggtgaga

SEQ ID NO: 3965 - RNA, 22 nt, synthetic construct
  source 1..22: mol_type = other RNA
caggtgaagcagcgtctccttc

SEQ ID NO: 3966 - RNA, 22 nt, synthetic construct
  source 1..22: mol_type = other RNA
cagtcccgcccaccaagccccg

SEQ ID NO: 3967 - RNA, 22 nt, synthetic construct
  source 1..22: mol_type = other RNA
cagtggatgcatggctgcgagc

SEQ ID NO: 3968 - RNA, 22 nt, synthetic construct
  source 1..22: mol_type = other RNA
cagttcgcctacgacggcaagg

SEQ ID NO: 3969 - RNA, 22 nt, synthetic construct
  source 1..22: mol_type = other RNA
catcatttgacttttgctcgga

SEQ ID NO: 3970 - RNA, 22 nt, synthetic construct
  source 1..22: mol_type = other RNA
catccactgcagggtgtgagac

SEQ ID NO: 3971 - RNA, 22 nt, synthetic construct
  source 1..22: mol_type = other RNA
catgcatccactgcagggtgtg

SEQ ID NO: 3972 - RNA, 22 nt, synthetic construct
  source 1..22: mol_type = other RNA
catgcgtggagtggctccacaa

SEQ ID NO: 3973 - RNA, 22 nt, synthetic construct
  source 1..22: mol_type = other RNA
catggctgcgagctggggcccg

SEQ ID NO: 3974 - RNA, 22 nt, synthetic construct
  source 1..22: mol_type = other RNA
catgtgtcttccaggtaggctc

SEQ ID NO: 3975 - RNA, 22 nt, synthetic construct
  source 1..22: mol_type = other RNA
cattcagggtgagataatcctt

SEQ ID NO: 3976 - RNA, 22 nt, synthetic construct
  source 1..22: mol_type = other RNA
catttgacttttgctcggagat

SEQ ID NO: 3977 - RNA, 22 nt, synthetic construct
  source 1..22: mol_type = other RNA
ccacaaatacctggagaagggg

SEQ ID NO: 3978 - RNA, 22 nt, synthetic construct
  source 1..22: mol_type = other RNA
ccacagggtggtggcgacgggg

SEQ ID NO: 3979 - RNA, 22 nt, synthetic construct
  source 1..22: mol_type = other RNA
ccaccgcggtccaggagcgcag

SEQ ID NO: 3980 - RNA, 22 nt, synthetic construct
  source 1..22: mol_type = other RNA
ccacgcatgtgtcttccaggta

SEQ ID NO: 3981 - RNA, 22 nt, synthetic construct
  source 1..22: mol_type = other RNA
ccactccacgcatgtgtcttcc

SEQ ID NO: 3982 - RNA, 22 nt, synthetic construct
  source 1..22: mol_type = other RNA
ccactgcagggtgtgagaccct

SEQ ID NO: 3983 - RNA, 22 nt, synthetic construct
  source 1..22: mol_type = other RNA
ccagagagcctacctggaagac

SEQ ID NO: 3984 - RNA, 22 nt, synthetic construct
  source 1..22: mol_type = other RNA
ccagctcgcagccatgcatcca

SEQ ID NO: 3985 - RNA, 22 nt, synthetic construct
  source 1..22: mol_type = other RNA
ccaggagcgcaggtcctcattc

SEQ ID NO: 3986 - RNA, 22 nt, synthetic construct
  source 1..22: mol_type = other RNA
ccagggtctcacaccctgcagt

SEQ ID NO: 3987 - RNA, 22 nt, synthetic construct
  source 1..22: mol_type = other RNA
ccaggtaggctctctggtgctc

SEQ ID NO: 3988 - RNA, 22 nt, synthetic construct
  source 1..22: mol_type = other RNA
ccaggtatttgtggagccactc

SEQ ID NO: 3989 - RNA, 22 nt, synthetic construct
  source 1..22: mol_type = other RNA
ccaggtgaagcagcgtctcctt

SEQ ID NO: 3990 - RNA, 22 nt, synthetic construct
  source 1..22: mol_type = other RNA
ccatgcatccactgcagggtgt

SEQ ID NO: 3991 - RNA, 22 nt, synthetic construct
  source 1..22: mol_type = other RNA
cccacagggtggtggcgacggg

SEQ ID NO: 3992 - RNA, 22 nt, synthetic construct
  source 1..22: mol_type = other RNA
cccagctcgcagccatgcatcc

SEQ ID NO: 3993 - RNA, 22 nt, synthetic construct
  source 1..22: mol_type = other RNA
cccaggtgaagcagcgtctcct

SEQ ID NO: 3994 - RNA, 22 nt, synthetic construct
  source 1..22: mol_type = other RNA
ccccagctcgcagccatgcatc

SEQ ID NO: 3995 - RNA, 22 nt, synthetic construct
  source 1..22: mol_type = other RNA
cccccgtcgccaccaccctgtg

SEQ ID NO: 3996 - RNA, 22 nt, synthetic construct
  source 1..22: mol_type = other RNA
ccccgccccttagtcagtcccg

SEQ ID NO: 3997 - RNA, 22 nt, synthetic construct
  source 1..22: mol_type = other RNA
ccccttagtcagtcccgcccac

SEQ ID NO: 3998 - RNA, 22 nt, synthetic construct
  source 1..22: mol_type = other RNA
ccccttctccaggtatttgtgg

SEQ ID NO: 3999 - RNA, 22 nt, synthetic construct
  source 1..22: mol_type = other RNA
cccgccccttagtcagtcccgc

SEQ ID NO: 4000 - RNA, 22 nt, synthetic construct
  source 1..22: mol_type = other RNA
ccctcttacccaggtgaagcag

SEQ ID NO: 4001 - RNA, 22 nt, synthetic construct
  source 1..22: mol_type = other RNA
ccctgaatgaggacctgcgctc

SEQ ID NO: 4002 - RNA, 22 nt, synthetic construct
  source 1..22: mol_type = other RNA
ccctgcagtggatgcatggctg

SEQ ID NO: 4003 - RNA, 22 nt, synthetic construct
  source 1..22: mol_type = other RNA
ccctggccccgccccttagtca

SEQ ID NO: 4004 - RNA, 22 nt, synthetic construct
  source 1..22: mol_type = other RNA
ccctgtggaccctcttacccag

SEQ ID NO: 4005 - RNA, 22 nt, synthetic construct
  source 1..22: mol_type = other RNA
cccttagtcagtcccgcccacc

SEQ ID NO: 4006 - RNA, 22 nt, synthetic construct
  source 1..22: mol_type = other RNA
cccttctccaggtatttgtgga

SEQ ID NO: 4007 - RNA, 22 nt, synthetic construct
  source 1..22: mol_type = other RNA
ccgagcaaaagtcaaatgatgc

SEQ ID NO: 4008 - RNA, 22 nt, synthetic construct
  source 1..22: mol_type = other RNA
ccgccccttagtcagtcccgcc

SEQ ID NO: 4009 - RNA, 22 nt, synthetic construct
  source 1..22: mol_type = other RNA
ccgccgtgtccaccgcggtcca

SEQ ID NO: 4010 - RNA, 22 nt, synthetic construct
  source 1..22: mol_type = other RNA
ccgcctcagaggcatcatttga

SEQ ID NO: 4011 - RNA, 22 nt, synthetic construct
  source 1..22: mol_type = other RNA
ccgcgggtatgaacagttcgcc

SEQ ID NO: 4012 - RNA, 22 nt, synthetic construct
  source 1..22: mol_type = other RNA
ccgcggtccaggagcgcaggtc

SEQ ID NO: 4013 - RNA, 22 nt, synthetic construct
  source 1..22: mol_type = other RNA
ccgcggtggacacggcggctca

SEQ ID NO: 4014 - RNA, 22 nt, synthetic construct
  source 1..22: mol_type = other RNA
ccgtcgtaggcgaactgttcat

SEQ ID NO: 4015 - RNA, 22 nt, synthetic construct
  source 1..22: mol_type = other RNA
ccgtgtccaccgcggtccagga

SEQ ID NO: 4016 - RNA, 22 nt, synthetic construct
  source 1..22: mol_type = other RNA
cctacctggaagacacatgcgt

SEQ ID NO: 4017 - RNA, 22 nt, synthetic construct
  source 1..22: mol_type = other RNA
cctacgacggcaaggattatct

SEQ ID NO: 4018 - RNA, 22 nt, synthetic construct
  source 1..22: mol_type = other RNA
cctcagaggcatcatttgactt

SEQ ID NO: 4019 - RNA, 22 nt, synthetic construct
  source 1..22: mol_type = other RNA
cctcattcagggtgagataatc

SEQ ID NO: 4020 - RNA, 22 nt, synthetic construct
  source 1..22: mol_type = other RNA
cctccgcgggtatgaacagttc

SEQ ID NO: 4021 - RNA, 22 nt, synthetic construct
  source 1..22: mol_type = other RNA
cctctgaggcggagcaccagag

SEQ ID NO: 4022 - RNA, 22 nt, synthetic construct
  source 1..22: mol_type = other RNA
cctcttacccaggtgaagcagc

SEQ ID NO: 4023 - RNA, 22 nt, synthetic construct
  source 1..22: mol_type = other RNA
cctgaatgaggacctgcgctcc

SEQ ID NO: 4024 - RNA, 22 nt, synthetic construct
  source 1..22: mol_type = other RNA
cctgcagtggatgcatggctgc

SEQ ID NO: 4025 - RNA, 22 nt, synthetic construct
  source 1..22: mol_type = other RNA
cctgcgctcctggaccgcggtg

SEQ ID NO: 4026 - RNA, 22 nt, synthetic construct
  source 1..22: mol_type = other RNA
cctggaagacacatgcgtggag

SEQ ID NO: 4027 - RNA, 22 nt, synthetic construct
  source 1..22: mol_type = other RNA
cctggaccgcggtggacacggc

SEQ ID NO: 4028 - RNA, 22 nt, synthetic construct
  source 1..22: mol_type = other RNA
cctggagaaggggaaggagacg

SEQ ID NO: 4029 - RNA, 22 nt, synthetic construct
  source 1..22: mol_type = other RNA
cctggccccgccccttagtcag

SEQ ID NO: 4030 - RNA, 22 nt, synthetic construct
  source 1..22: mol_type = other RNA
cctgggtaagagggtccacagg

SEQ ID NO: 4031 - RNA, 22 nt, synthetic construct
  source 1..22: mol_type = other RNA
cctgtggaccctcttacccagg

SEQ ID NO: 4032 - RNA, 22 nt, synthetic construct
  source 1..22: mol_type = other RNA
ccttagtcagtcccgcccacca

SEQ ID NO: 4033 - RNA, 22 nt, synthetic construct
  source 1..22: mol_type = other RNA
ccttccccttctccaggtattt

SEQ ID NO: 4034 - RNA, 22 nt, synthetic construct
  source 1..22: mol_type = other RNA
ccttctccaggtatttgtggag

SEQ ID NO: 4035 - RNA, 22 nt, synthetic construct
  source 1..22: mol_type = other RNA
ccttgccgtcgtaggcgaactg

SEQ ID NO: 4036 - RNA, 22 nt, synthetic construct
  source 1..22: mol_type = other RNA
cgaactgttcatacccgcggag

SEQ ID NO: 4037 - RNA, 22 nt, synthetic construct
  source 1..22: mol_type = other RNA
cgacggcaaggattatctcacc

SEQ ID NO: 4038 - RNA, 22 nt, synthetic construct
  source 1..22: mol_type = other RNA
cgagcaaaagtcaaatgatgcc

SEQ ID NO: 4039 - RNA, 22 nt, synthetic construct
  source 1..22: mol_type = other RNA
cgcagccatgcatccactgcag

SEQ ID NO: 4040 - RNA, 22 nt, synthetic construct
  source 1..22: mol_type = other RNA
cgcaggtcctcattcagggtga

SEQ ID NO: 4041 - RNA, 22 nt, synthetic construct
  source 1..22: mol_type = other RNA
cgcatgtgtcttccaggtaggc

SEQ ID NO: 4042 - RNA, 22 nt, synthetic construct
  source 1..22: mol_type = other RNA
cgccccttagtcagtcccgccc

SEQ ID NO: 4043 - RNA, 22 nt, synthetic construct
  source 1..22: mol_type = other RNA
cgccgtgtccaccgcggtccag

SEQ ID NO: 4044 - RNA, 22 nt, synthetic construct
  source 1..22: mol_type = other RNA
cgcctacgacggcaaggattat

SEQ ID NO: 4045 - RNA, 22 nt, synthetic construct
  source 1..22: mol_type = other RNA
cgcctcagaggcatcatttgac

SEQ ID NO: 4046 - RNA, 22 nt, synthetic construct
  source 1..22: mol_type = other RNA
cgcgggtatgaacagttcgcct

SEQ ID NO: 4047 - RNA, 22 nt, synthetic construct
  source 1..22: mol_type = other RNA
cgcggtccaggagcgcaggtcc

SEQ ID NO: 4048 - RNA, 22 nt, synthetic construct
  source 1..22: mol_type = other RNA
cgcggtggacacggcggctcag

SEQ ID NO: 4049 - RNA, 22 nt, synthetic construct
  source 1..22: mol_type = other RNA
cgctcctggaccgcggtggaca

SEQ ID NO: 4050 - RNA, 22 nt, synthetic construct
  source 1..22: mol_type = other RNA
cgctgcttcacctgggtaagag

SEQ ID NO: 4051 - RNA, 22 nt, synthetic construct
  source 1..22: mol_type = other RNA
cgcttcctccgcgggtatgaac

SEQ ID NO: 4052 - RNA, 22 nt, synthetic construct
  source 1..22: mol_type = other RNA
cggagatctgagccgccgtgtc

SEQ ID NO: 4053 - RNA, 22 nt, synthetic construct
  source 1..22: mol_type = other RNA
cggagcaccagagagcctacct

SEQ ID NO: 4054 - RNA, 22 nt, synthetic construct
  source 1..22: mol_type = other RNA
cggcaaggattatctcaccctg

SEQ ID NO: 4055 - RNA, 22 nt, synthetic construct
  source 1..22: mol_type = other RNA
cggcggctcagatctccgagca

SEQ ID NO: 4056 - RNA, 22 nt, synthetic construct
  source 1..22: mol_type = other RNA
cggctcagatctccgagcaaaa

SEQ ID NO: 4057 - RNA, 22 nt, synthetic construct
  source 1..22: mol_type = other RNA
cgggactgactaaggggcgggg

SEQ ID NO: 4058 - RNA, 22 nt, synthetic construct
  source 1..22: mol_type = other RNA
cgggccccagctcgcagccatg

SEQ ID NO: 4059 - RNA, 22 nt, synthetic construct
  source 1..22: mol_type = other RNA
cgggcgcttcctccgcgggtat

SEQ ID NO: 4060 - RNA, 22 nt, synthetic construct
  source 1..22: mol_type = other RNA
cggggccagggtctcacaccct

SEQ ID NO: 4061 - RNA, 22 nt, synthetic construct
  source 1..22: mol_type = other RNA
cggggcttggtgggcgggactg

SEQ ID NO: 4062 - RNA, 22 nt, synthetic construct
  source 1..22: mol_type = other RNA
cgggtatgaacagttcgcctac

SEQ ID NO: 4063 - RNA, 22 nt, synthetic construct
  source 1..22: mol_type = other RNA
cggtccaggagcgcaggtcctc

SEQ ID NO: 4064 - RNA, 22 nt, synthetic construct
  source 1..22: mol_type = other RNA
cggtggacacggcggctcagat

SEQ ID NO: 4065 - RNA, 22 nt, synthetic construct
  source 1..22: mol_type = other RNA
cgtaggcgaactgttcataccc

SEQ ID NO: 4066 - RNA, 22 nt, synthetic construct
  source 1..22: mol_type = other RNA
cgtcgtaggcgaactgttcata

SEQ ID NO: 4067 - RNA, 22 nt, synthetic construct
  source 1..22: mol_type = other RNA
cgtctccttccccttctccagg

SEQ ID NO: 4068 - RNA, 22 nt, synthetic construct
  source 1..22: mol_type = other RNA
cgtggagtggctccacaaatac

SEQ ID NO: 4069 - RNA, 22 nt, synthetic construct
  source 1..22: mol_type = other RNA
cgtgtccaccgcggtccaggag

SEQ ID NO: 4070 - RNA, 22 nt, synthetic construct
  source 1..22: mol_type = other RNA
ctaaggggcggggccagggtct

SEQ ID NO: 4071 - RNA, 22 nt, synthetic construct
  source 1..22: mol_type = other RNA
ctacctggaagacacatgcgtg

SEQ ID NO: 4072 - RNA, 22 nt, synthetic construct
  source 1..22: mol_type = other RNA
ctacgacggcaaggattatctc

SEQ ID NO: 4073 - RNA, 22 nt, synthetic construct
  source 1..22: mol_type = other RNA
ctcacaccctgcagtggatgca

SEQ ID NO: 4074 - RNA, 22 nt, synthetic construct
  source 1..22: mol_type = other RNA
ctcaccctgaatgaggacctgc

SEQ ID NO: 4075 - RNA, 22 nt, synthetic construct
  source 1..22: mol_type = other RNA
ctcagaggcatcatttgacttt

SEQ ID NO: 4076 - RNA, 22 nt, synthetic construct
  source 1..22: mol_type = other RNA
ctcagatctccgagcaaaagtc

SEQ ID NO: 4077 - RNA, 22 nt, synthetic construct
  source 1..22: mol_type = other RNA
ctcattcagggtgagataatcc

SEQ ID NO: 4078 - RNA, 22 nt, synthetic construct
  source 1..22: mol_type = other RNA
ctccacaaatacctggagaagg

SEQ ID NO: 4079 - RNA, 22 nt, synthetic construct
  source 1..22: mol_type = other RNA
ctccacgcatgtgtcttccagg

SEQ ID NO: 4080 - RNA, 22 nt, synthetic construct
  source 1..22: mol_type = other RNA
ctccaggtatttgtggagccac

SEQ ID NO: 4081 - RNA, 22 nt, synthetic construct
  source 1..22: mol_type = other RNA
ctccgagcaaaagtcaaatgat

SEQ ID NO: 4082 - RNA, 22 nt, synthetic construct
  source 1..22: mol_type = other RNA
ctccgcctcagaggcatcattt

SEQ ID NO: 4083 - RNA, 22 nt, synthetic construct
  source 1..22: mol_type = other RNA
ctccgcgggtatgaacagttcg

SEQ ID NO: 4084 - RNA, 22 nt, synthetic construct
  source 1..22: mol_type = other RNA
ctcctggaccgcggtggacacg

SEQ ID NO: 4085 - RNA, 22 nt, synthetic construct
  source 1..22: mol_type = other RNA
ctccttccccttctccaggtat

SEQ ID NO: 4086 - RNA, 22 nt, synthetic construct
  source 1..22: mol_type = other RNA
ctcgcagccatgcatccactgc

SEQ ID NO: 4087 - RNA, 22 nt, synthetic construct
  source 1..22: mol_type = other RNA
ctcggagatctgagccgccgtg

SEQ ID NO: 4088 - RNA, 22 nt, synthetic construct
  source 1..22: mol_type = other RNA
ctctctggtgctccgcctcaga

SEQ ID NO: 4089 - RNA, 22 nt, synthetic construct
  source 1..22: mol_type = other RNA
ctctgaggcggagcaccagaga

SEQ ID NO: 4090 - RNA, 22 nt, synthetic construct
  source 1..22: mol_type = other RNA
ctctggtgctccgcctcagagg

SEQ ID NO: 4091 - RNA, 22 nt, synthetic construct
  source 1..22: mol_type = other RNA
ctcttacccaggtgaagcagcg

SEQ ID NO: 4092 - RNA, 22 nt, synthetic construct
  source 1..22: mol_type = other RNA
ctgaatgaggacctgcgctcct

SEQ ID NO: 4093 - RNA, 22 nt, synthetic construct
  source 1..22: mol_type = other RNA
ctgactaaggggcggggccagg

SEQ ID NO: 4094 - RNA, 22 nt, synthetic construct
  source 1..22: mol_type = other RNA
ctgagccgccgtgtccaccgcg

SEQ ID NO: 4095 - RNA, 22 nt, synthetic construct
  source 1..22: mol_type = other RNA
ctgaggcggagcaccagagagc

SEQ ID NO: 4096 - RNA, 22 nt, synthetic construct
  source 1..22: mol_type = other RNA
ctgcagggtgtgagaccctggc

SEQ ID NO: 4097 - RNA, 22 nt, synthetic construct
  source 1..22: mol_type = other RNA
ctgcagtggatgcatggctgcg

SEQ ID NO: 4098 - RNA, 22 nt, synthetic construct
  source 1..22: mol_type = other RNA
ctgcgctcctggaccgcggtgg

SEQ ID NO: 4099 - RNA, 22 nt, synthetic construct
  source 1..22: mol_type = other RNA
ctgcttcacctgggtaagaggg

SEQ ID NO: 4100 - RNA, 22 nt, synthetic construct
  source 1..22: mol_type = other RNA
ctggaagacacatgcgtggagt

SEQ ID NO: 4101 - RNA, 22 nt, synthetic construct
  source 1..22: mol_type = other RNA
ctggaccgcggtggacacggcg

SEQ ID NO: 4102 - RNA, 22 nt, synthetic construct
  source 1..22: mol_type = other RNA
ctggagaaggggaaggagacgc

SEQ ID NO: 4103 - RNA, 22 nt, synthetic construct
  source 1..22: mol_type = other RNA
ctggccccgccccttagtcagt

SEQ ID NO: 4104 - RNA, 22 nt, synthetic construct
  source 1..22: mol_type = other RNA
ctgggtaagagggtccacaggg

SEQ ID NO: 4105 - RNA, 22 nt, synthetic construct
  source 1..22: mol_type = other RNA
ctggtgctccgcctcagaggca

SEQ ID NO: 4106 - RNA, 22 nt, synthetic construct
  source 1..22: mol_type = other RNA
ctgtggaccctcttacccaggt

SEQ ID NO: 4107 - RNA, 22 nt, synthetic construct
  source 1..22: mol_type = other RNA
cttacccaggtgaagcagcgtc

SEQ ID NO: 4108 - RNA, 22 nt, synthetic construct
  source 1..22: mol_type = other RNA
cttagtcagtcccgcccaccaa

SEQ ID NO: 4109 - RNA, 22 nt, synthetic construct
  source 1..22: mol_type = other RNA
cttcacctgggtaagagggtcc

SEQ ID NO: 4110 - RNA, 22 nt, synthetic construct
  source 1..22: mol_type = other RNA
cttccaggtaggctctctggtg

SEQ ID NO: 4111 - RNA, 22 nt, synthetic construct
  source 1..22: mol_type = other RNA
cttccccttctccaggtatttg

SEQ ID NO: 4112 - RNA, 22 nt, synthetic construct
  source 1..22: mol_type = other RNA
cttcctccgcgggtatgaacag

SEQ ID NO: 4113 - RNA, 22 nt, synthetic construct
  source 1..22: mol_type = other RNA
cttctccaggtatttgtggagc

SEQ ID NO: 4114 - RNA, 22 nt, synthetic construct
  source 1..22: mol_type = other RNA
cttgccgtcgtaggcgaactgt

SEQ ID NO: 4115 - RNA, 22 nt, synthetic construct
  source 1..22: mol_type = other RNA
cttggtgggcgggactgactaa

SEQ ID NO: 4116 - RNA, 22 nt, synthetic construct
  source 1..22: mol_type = other RNA
cttttgctcggagatctgagcc

SEQ ID NO: 4117 - RNA, 22 nt, synthetic construct
  source 1..22: mol_type = other RNA
gaacagttcgcctacgacggca

SEQ ID NO: 4118 - RNA, 22 nt, synthetic construct
  source 1..22: mol_type = other RNA
gaactgttcatacccgcggagg

SEQ ID NO: 4119 - RNA, 22 nt, synthetic construct
  source 1..22: mol_type = other RNA
gaagacacatgcgtggagtggc

SEQ ID NO: 4120 - RNA, 22 nt, synthetic construct
  source 1..22: mol_type = other RNA
gaagcagcgtctccttcccctt

SEQ ID NO: 4121 - RNA, 22 nt, synthetic construct
  source 1..22: mol_type = other RNA
gaaggagacgctgcttcacctg

SEQ ID NO: 4122 - RNA, 22 nt, synthetic construct
  source 1..22: mol_type = other RNA
gaaggagatgggagagtagccc

SEQ ID NO: 4123 - RNA, 22 nt, synthetic construct
  source 1..22: mol_type = other RNA
gaaggggaaggagacgctgctt

SEQ ID NO: 4124 - RNA, 22 nt, synthetic construct
  source 1..22: mol_type = other RNA
gaatgaggacctgcgctcctgg

SEQ ID NO: 4125 - RNA, 22 nt, synthetic construct
  source 1..22: mol_type = other RNA
gacacatgcgtggagtggctcc

SEQ ID NO: 4126 - RNA, 22 nt, synthetic construct
  source 1..22: mol_type = other RNA
gacacggcggctcagatctccg

SEQ ID NO: 4127 - RNA, 22 nt, synthetic construct
  source 1..22: mol_type = other RNA
gaccctcttacccaggtgaagc

SEQ ID NO: 4128 - RNA, 22 nt, synthetic construct
  source 1..22: mol_type = other RNA
gaccctggccccgccccttagt

SEQ ID NO: 4129 - RNA, 22 nt, synthetic construct
  source 1..22: mol_type = other RNA
gaccgcggtggacacggcggct

SEQ ID NO: 4130 - RNA, 22 nt, synthetic construct
  source 1..22: mol_type = other RNA
gacctgcgctcctggaccgcgg

SEQ ID NO: 4131 - RNA, 22 nt, synthetic construct
  source 1..22: mol_type = other RNA
gacgctgcttcacctgggtaag

SEQ ID NO: 4132 - RNA, 22 nt, synthetic construct
  source 1..22: mol_type = other RNA
gacggcaaggattatctcaccc

SEQ ID NO: 4133 - RNA, 22 nt, synthetic construct
  source 1..22: mol_type = other RNA
gactaaggggcggggccagggt

SEQ ID NO: 4134 - RNA, 22 nt, synthetic construct
  source 1..22: mol_type = other RNA
gactgactaaggggcggggcca

SEQ ID NO: 4135 - RNA, 22 nt, synthetic construct
  source 1..22: mol_type = other RNA
gacttttgctcggagatctgag

SEQ ID NO: 4136 - RNA, 22 nt, synthetic construct
  source 1..22: mol_type = other RNA
gagaaggggaaggagacgctgc

SEQ ID NO: 4137 - RNA, 22 nt, synthetic construct
  source 1..22: mol_type = other RNA
gagaccctggccccgcccctta

SEQ ID NO: 4138 - RNA, 22 nt, synthetic construct
  source 1..22: mol_type = other RNA
gagacgctgcttcacctgggta

SEQ ID NO: 4139 - RNA, 22 nt, synthetic construct
  source 1..22: mol_type = other RNA
gagagcctacctggaagacaca

SEQ ID NO: 4140 - RNA, 22 nt, synthetic construct
  source 1..22: mol_type = other RNA
gagagtagccctgtggaccctc

SEQ ID NO: 4141 - RNA, 22 nt, synthetic construct
  source 1..22: mol_type = other RNA
gagataatccttgccgtcgtag

SEQ ID NO: 4142 - RNA, 22 nt, synthetic construct
  source 1..22: mol_type = other RNA
gagatctgagccgccgtgtcca

SEQ ID NO: 4143 - RNA, 22 nt, synthetic construct
  source 1..22: mol_type = other RNA
gagatgggagagtagccctgtg

SEQ ID NO: 4144 - RNA, 22 nt, synthetic construct
  source 1..22: mol_type = other RNA
gagcaaaagtcaaatgatgcct

SEQ ID NO: 4145 - RNA, 22 nt, synthetic construct
  source 1..22: mol_type = other RNA
gagcaccagagagcctacctgg

SEQ ID NO: 4146 - RNA, 22 nt, synthetic construct
  source 1..22: mol_type = other RNA
gagccactccacgcatgtgtct

SEQ ID NO: 4147 - RNA, 22 nt, synthetic construct
  source 1..22: mol_type = other RNA
gagccgccgtgtccaccgcggt

SEQ ID NO: 4148 - RNA, 22 nt, synthetic construct
  source 1..22: mol_type = other RNA
gagcctacctggaagacacatg

SEQ ID NO: 4149 - RNA, 22 nt, synthetic construct
  source 1..22: mol_type = other RNA
gagcgcaggtcctcattcaggg

SEQ ID NO: 4150 - RNA, 22 nt, synthetic construct
  source 1..22: mol_type = other RNA
gaggacctgcgctcctggaccg

SEQ ID NO: 4151 - RNA, 22 nt, synthetic construct
  source 1..22: mol_type = other RNA
gaggcatcatttgacttttgct

SEQ ID NO: 4152 - RNA, 22 nt, synthetic construct
  source 1..22: mol_type = other RNA
gaggcggagcaccagagagcct

SEQ ID NO: 4153 - RNA, 22 nt, synthetic construct
  source 1..22: mol_type = other RNA
gagggtccacagggctactctc

SEQ ID NO: 4154 - RNA, 22 nt, synthetic construct
  source 1..22: mol_type = other RNA
gagtagccctgtggaccctctt

SEQ ID NO: 4155 - RNA, 22 nt, synthetic construct
  source 1..22: mol_type = other RNA
gagtggctccacaaatacctgg

SEQ ID NO: 4156 - RNA, 22 nt, synthetic construct
  source 1..22: mol_type = other RNA
gataatccttgccgtcgtaggc

SEQ ID NO: 4157 - RNA, 22 nt, synthetic construct
  source 1..22: mol_type = other RNA
gatctccgagcaaaagtcaaat

SEQ ID NO: 4158 - RNA, 22 nt, synthetic construct
  source 1..22: mol_type = other RNA
gatctgagccgccgtgtccacc

SEQ ID NO: 4159 - RNA, 22 nt, synthetic construct
  source 1..22: mol_type = other RNA
gatgcatggctgcgagctgggg

SEQ ID NO: 4160 - RNA, 22 nt, synthetic construct
  source 1..22: mol_type = other RNA
gatgcctctgaggcggagcacc

SEQ ID NO: 4161 - RNA, 22 nt, synthetic construct
  source 1..22: mol_type = other RNA
gatgggagagtagccctgtgga

SEQ ID NO: 4162 - RNA, 22 nt, synthetic construct
  source 1..22: mol_type = other RNA
gattatctcaccctgaatgagg

SEQ ID NO: 4163 - RNA, 22 nt, synthetic construct
  source 1..22: mol_type = other RNA
gcaaaagtcaaatgatgcctct

SEQ ID NO: 4164 - RNA, 22 nt, synthetic construct
  source 1..22: mol_type = other RNA
gcaaggattatctcaccctgaa

SEQ ID NO: 4165 - RNA, 22 nt, synthetic construct
  source 1..22: mol_type = other RNA
gcaccagagagcctacctggaa

SEQ ID NO: 4166 - RNA, 22 nt, synthetic construct
  source 1..22: mol_type = other RNA
gcagccatgcatccactgcagg

SEQ ID NO: 4167 - RNA, 22 nt, synthetic construct
  source 1..22: mol_type = other RNA
gcagcgtctccttccccttctc

SEQ ID NO: 4168 - RNA, 22 nt, synthetic construct
  source 1..22: mol_type = other RNA
gcagggtgtgagaccctggccc

SEQ ID NO: 4169 - RNA, 22 nt, synthetic construct
  source 1..22: mol_type = other RNA
gcaggtcctcattcagggtgag

SEQ ID NO: 4170 - RNA, 22 nt, synthetic construct
  source 1..22: mol_type = other RNA
gcagtggatgcatggctgcgag

SEQ ID NO: 4171 - RNA, 22 nt, synthetic construct
  source 1..22: mol_type = other RNA
gcatcatttgacttttgctcgg

SEQ ID NO: 4172 - RNA, 22 nt, synthetic construct
  source 1..22: mol_type = other RNA
gcatccactgcagggtgtgaga

SEQ ID NO: 4173 - RNA, 22 nt, synthetic construct
  source 1..22: mol_type = other RNA
gcatggctgcgagctggggccc

SEQ ID NO: 4174 - RNA, 22 nt, synthetic construct
  source 1..22: mol_type = other RNA
gcatgtgtcttccaggtaggct

SEQ ID NO: 4175 - RNA, 22 nt, synthetic construct
  source 1..22: mol_type = other RNA
gccactccacgcatgtgtcttc

SEQ ID NO: 4176 - RNA, 22 nt, synthetic construct
  source 1..22: mol_type = other RNA
gccagggtctcacaccctgcag

SEQ ID NO: 4177 - RNA, 22 nt, synthetic construct
  source 1..22: mol_type = other RNA
gccatgcatccactgcagggtg

SEQ ID NO: 4178 - RNA, 22 nt, synthetic construct
  source 1..22: mol_type = other RNA
gcccacagggtggtggcgacgg

SEQ ID NO: 4179 - RNA, 22 nt, synthetic construct
  source 1..22: mol_type = other RNA
gccccagctcgcagccatgcat

SEQ ID NO: 4180 - RNA, 22 nt, synthetic construct
  source 1..22: mol_type = other RNA
gcccccgtcgccaccaccctgt

SEQ ID NO: 4181 - RNA, 22 nt, synthetic construct
  source 1..22: mol_type = other RNA
gccccgccccttagtcagtccc

SEQ ID NO: 4182 - RNA, 22 nt, synthetic construct
  source 1..22: mol_type = other RNA
gccccttagtcagtcccgccca

SEQ ID NO: 4183 - RNA, 22 nt, synthetic construct
  source 1..22: mol_type = other RNA
gccctgtggaccctcttaccca

SEQ ID NO: 4184 - RNA, 22 nt, synthetic construct
  source 1..22: mol_type = other RNA
gccgtcgtaggcgaactgttca

SEQ ID NO: 4185 - RNA, 22 nt, synthetic construct
  source 1..22: mol_type = other RNA
gccgtgtccaccgcggtccagg

SEQ ID NO: 4186 - RNA, 22 nt, synthetic construct
  source 1..22: mol_type = other RNA
gcctacctggaagacacatgcg

SEQ ID NO: 4187 - RNA, 22 nt, synthetic construct
  source 1..22: mol_type = other RNA
gcctacgacggcaaggattatc

SEQ ID NO: 4188 - RNA, 22 nt, synthetic construct
  source 1..22: mol_type = other RNA
gcctcagaggcatcatttgact

SEQ ID NO: 4189 - RNA, 22 nt, synthetic construct
  source 1..22: mol_type = other RNA
gcctctgaggcggagcaccaga

SEQ ID NO: 4190 - RNA, 22 nt, synthetic construct
  source 1..22: mol_type = other RNA
gcgaactgttcatacccgcgga

SEQ ID NO: 4191 - RNA, 22 nt, synthetic construct
  source 1..22: mol_type = other RNA
gcgcaggtcctcattcagggtg

SEQ ID NO: 4192 - RNA, 22 nt, synthetic construct
  source 1..22: mol_type = other RNA
gcgctcctggaccgcggtggac

SEQ ID NO: 4193 - RNA, 22 nt, synthetic construct
  source 1..22: mol_type = other RNA
gcgcttcctccgcgggtatgaa

SEQ ID NO: 4194 - RNA, 22 nt, synthetic construct
  source 1..22: mol_type = other RNA
gcggagcaccagagagcctacc

SEQ ID NO: 4195 - RNA, 22 nt, synthetic construct
  source 1..22: mol_type = other RNA
gcggctcagatctccgagcaaa

SEQ ID NO: 4196 - RNA, 22 nt, synthetic construct
  source 1..22: mol_type = other RNA
gcgggactgactaaggggcggg

SEQ ID NO: 4197 - RNA, 22 nt, synthetic construct
  source 1..22: mol_type = other RNA
gcggggccagggtctcacaccc

SEQ ID NO: 4198 - RNA, 22 nt, synthetic construct
  source 1..22: mol_type = other RNA
gcggggcttggtgggcgggact

SEQ ID NO: 4199 - RNA, 22 nt, synthetic construct
  source 1..22: mol_type = other RNA
gcgggtatgaacagttcgccta

SEQ ID NO: 4200 - RNA, 22 nt, synthetic construct
  source 1..22: mol_type = other RNA
gcggtccaggagcgcaggtcct

SEQ ID NO: 4201 - RNA, 22 nt, synthetic construct
  source 1..22: mol_type = other RNA
gcggtggacacggcggctcaga

SEQ ID NO: 4202 - RNA, 22 nt, synthetic construct
  source 1..22: mol_type = other RNA
gcgtctccttccccttctccag

SEQ ID NO: 4203 - RNA, 22 nt, synthetic construct
  source 1..22: mol_type = other RNA
gcgtggagtggctccacaaata

SEQ ID NO: 4204 - RNA, 22 nt, synthetic construct
  source 1..22: mol_type = other RNA
gctcagatctccgagcaaaagt

SEQ ID NO: 4205 - RNA, 22 nt, synthetic construct
  source 1..22: mol_type = other RNA
gctccacaaatacctggagaag

SEQ ID NO: 4206 - RNA, 22 nt, synthetic construct
  source 1..22: mol_type = other RNA
gctccgcctcagaggcatcatt

SEQ ID NO: 4207 - RNA, 22 nt, synthetic construct
  source 1..22: mol_type = other RNA
gctcctggaccgcggtggacac

SEQ ID NO: 4208 - RNA, 22 nt, synthetic construct
  source 1..22: mol_type = other RNA
gctcgcagccatgcatccactg

SEQ ID NO: 4209 - RNA, 22 nt, synthetic construct
  source 1..22: mol_type = other RNA
gctcggagatctgagccgccgt

SEQ ID NO: 4210 - RNA, 22 nt, synthetic construct
  source 1..22: mol_type = other RNA
gctctctggtgctccgcctcag

SEQ ID NO: 4211 - RNA, 22 nt, synthetic construct
  source 1..22: mol_type = other RNA
gctgcttcacctgggtaagagg

SEQ ID NO: 4212 - RNA, 22 nt, synthetic construct
  source 1..22: mol_type = other RNA
gcttcacctgggtaagagggtc

SEQ ID NO: 4213 - RNA, 22 nt, synthetic construct
  source 1..22: mol_type = other RNA
gcttcctccgcgggtatgaaca

SEQ ID NO: 4214 - RNA, 22 nt, synthetic construct
  source 1..22: mol_type = other RNA
gcttggtgggcgggactgacta

SEQ ID NO: 4215 - RNA, 22 nt, synthetic construct
  source 1..22: mol_type = other RNA
ggaagacacatgcgtggagtgg

SEQ ID NO: 4216 - RNA, 22 nt, synthetic construct
  source 1..22: mol_type = other RNA
ggaaggagacgctgcttcacct

SEQ ID NO: 4217 - RNA, 22 nt, synthetic construct
  source 1..22: mol_type = other RNA
ggacacggcggctcagatctcc

SEQ ID NO: 4218 - RNA, 22 nt, synthetic construct
  source 1..22: mol_type = other RNA
ggaccctcttacccaggtgaag

SEQ ID NO: 4219 - RNA, 22 nt, synthetic construct
  source 1..22: mol_type = other RNA
ggacctgcgctcctggaccgcg

SEQ ID NO: 4220 - RNA, 22 nt, synthetic construct
  source 1..22: mol_type = other RNA
ggactgactaaggggcggggcc

SEQ ID NO: 4221 - RNA, 22 nt, synthetic construct
  source 1..22: mol_type = other RNA
ggagaaggggaaggagacgctg

SEQ ID NO: 4222 - RNA, 22 nt, synthetic construct
  source 1..22: mol_type = other RNA
ggagacgctgcttcacctgggt

SEQ ID NO: 4223 - RNA, 22 nt, synthetic construct
  source 1..22: mol_type = other RNA
ggagagtagccctgtggaccct

SEQ ID NO: 4224 - RNA, 22 nt, synthetic construct
  source 1..22: mol_type = other RNA
ggagatctgagccgccgtgtcc

SEQ ID NO: 4225 - RNA, 22 nt, synthetic construct
  source 1..22: mol_type = other RNA
ggagatgggagagtagccctgt

SEQ ID NO: 4226 - RNA, 22 nt, synthetic construct
  source 1..22: mol_type = other RNA
ggagcaccagagagcctacctg

SEQ ID NO: 4227 - RNA, 22 nt, synthetic construct
  source 1..22: mol_type = other RNA
ggagccactccacgcatgtgtc

SEQ ID NO: 4228 - RNA, 22 nt, synthetic construct
  source 1..22: mol_type = other RNA
ggagcgcaggtcctcattcagg

SEQ ID NO: 4229 - RNA, 22 nt, synthetic construct
  source 1..22: mol_type = other RNA
ggagtggctccacaaatacctg

SEQ ID NO: 4230 - RNA, 22 nt, synthetic construct
  source 1..22: mol_type = other RNA
ggatgcatggctgcgagctggg

SEQ ID NO: 4231 - RNA, 22 nt, synthetic construct
  source 1..22: mol_type = other RNA
ggattatctcaccctgaatgag

SEQ ID NO: 4232 - RNA, 22 nt, synthetic construct
  source 1..22: mol_type = other RNA
ggcaaggattatctcaccctga

SEQ ID NO: 4233 - RNA, 22 nt, synthetic construct
  source 1..22: mol_type = other RNA
ggcatcatttgacttttgctcg

SEQ ID NO: 4234 - RNA, 22 nt, synthetic construct
  source 1..22: mol_type = other RNA
ggccagggtctcacaccctgca

SEQ ID NO: 4235 - RNA, 22 nt, synthetic construct
  source 1..22: mol_type = other RNA
ggccccagctcgcagccatgca

SEQ ID NO: 4236 - RNA, 22 nt, synthetic construct
  source 1..22: mol_type = other RNA
ggccccgccccttagtcagtcc

SEQ ID NO: 4237 - RNA, 22 nt, synthetic construct
  source 1..22: mol_type = other RNA
ggcgaactgttcatacccgcgg

SEQ ID NO: 4238 - RNA, 22 nt, synthetic construct
  source 1..22: mol_type = other RNA
ggcgcttcctccgcgggtatga

SEQ ID NO: 4239 - RNA, 22 nt, synthetic construct
  source 1..22: mol_type = other RNA
ggcggagcaccagagagcctac

SEQ ID NO: 4240 - RNA, 22 nt, synthetic construct
  source 1..22: mol_type = other RNA
ggcggctcagatctccgagcaa

SEQ ID NO: 4241 - RNA, 22 nt, synthetic construct
  source 1..22: mol_type = other RNA
ggcgggactgactaaggggcgg

SEQ ID NO: 4242 - RNA, 22 nt, synthetic construct
  source 1..22: mol_type = other RNA
ggcggggccagggtctcacacc

SEQ ID NO: 4243 - RNA, 22 nt, synthetic construct
  source 1..22: mol_type = other RNA
ggctcagatctccgagcaaaag

SEQ ID NO: 4244 - RNA, 22 nt, synthetic construct
  source 1..22: mol_type = other RNA
ggctccacaaatacctggagaa

SEQ ID NO: 4245 - RNA, 22 nt, synthetic construct
  source 1..22: mol_type = other RNA
ggctctctggtgctccgcctca

SEQ ID NO: 4246 - RNA, 22 nt, synthetic construct
  source 1..22: mol_type = other RNA
ggcttggtgggcgggactgact

SEQ ID NO: 4247 - RNA, 22 nt, synthetic construct
  source 1..22: mol_type = other RNA
gggaaggagacgctgcttcacc

SEQ ID NO: 4248 - RNA, 22 nt, synthetic construct
  source 1..22: mol_type = other RNA
gggactgactaaggggcggggc

SEQ ID NO: 4249 - RNA, 22 nt, synthetic construct
  source 1..22: mol_type = other RNA
gggagagtagccctgtggaccc

SEQ ID NO: 4250 - RNA, 22 nt, synthetic construct
  source 1..22: mol_type = other RNA
gggccagggtctcacaccctgc

SEQ ID NO: 4251 - RNA, 22 nt, synthetic construct
  source 1..22: mol_type = other RNA
gggccccagctcgcagccatgc

SEQ ID NO: 4252 - RNA, 22 nt, synthetic construct
  source 1..22: mol_type = other RNA
gggcgcttcctccgcgggtatg

SEQ ID NO: 4253 - RNA, 22 nt, synthetic construct
  source 1..22: mol_type = other RNA
gggcgggactgactaaggggcg

SEQ ID NO: 4254 - RNA, 22 nt, synthetic construct
  source 1..22: mol_type = other RNA
gggcggggccagggtctcacac

SEQ ID NO: 4255 - RNA, 22 nt, synthetic construct
  source 1..22: mol_type = other RNA
gggcttggtgggcgggactgac

SEQ ID NO: 4256 - RNA, 22 nt, synthetic construct
  source 1..22: mol_type = other RNA
ggggaaggagacgctgcttcac

SEQ ID NO: 4257 - RNA, 22 nt, synthetic construct
  source 1..22: mol_type = other RNA
ggggccagggtctcacaccctg

SEQ ID NO: 4258 - RNA, 22 nt, synthetic construct
  source 1..22: mol_type = other RNA
ggggcggggccagggtctcaca

SEQ ID NO: 4259 - RNA, 22 nt, synthetic construct
  source 1..22: mol_type = other RNA
ggggcttggtgggcgggactga

SEQ ID NO: 4260 - RNA, 22 nt, synthetic construct
  source 1..22: mol_type = other RNA
gggtaagagggtccacagggct

SEQ ID NO: 4261 - RNA, 22 nt, synthetic construct
  source 1..22: mol_type = other RNA
gggtatgaacagttcgcctacg

SEQ ID NO: 4262 - RNA, 22 nt, synthetic construct
  source 1..22: mol_type = other RNA
gggtccacagggctactctccc

SEQ ID NO: 4263 - RNA, 22 nt, synthetic construct
  source 1..22: mol_type = other RNA
gggtctcacaccctgcagtgga

SEQ ID NO: 4264 - RNA, 22 nt, synthetic construct
  source 1..22: mol_type = other RNA
gggtgagataatccttgccgtc

SEQ ID NO: 4265 - RNA, 22 nt, synthetic construct
  source 1..22: mol_type = other RNA
gggtgtgagaccctggccccgc

SEQ ID NO: 4266 - RNA, 22 nt, synthetic construct
  source 1..22: mol_type = other RNA
ggtaagagggtccacagggcta

SEQ ID NO: 4267 - RNA, 22 nt, synthetic construct
  source 1..22: mol_type = other RNA
ggtaggctctctggtgctccgc

SEQ ID NO: 4268 - RNA, 22 nt, synthetic construct
  source 1..22: mol_type = other RNA
ggtatgaacagttcgcctacga

SEQ ID NO: 4269 - RNA, 22 nt, synthetic construct
  source 1..22: mol_type = other RNA
ggtatttgtggagccactccac

SEQ ID NO: 4270 - RNA, 22 nt, synthetic construct
  source 1..22: mol_type = other RNA
ggtccacagggctactctccca

SEQ ID NO: 4271 - RNA, 22 nt, synthetic construct
  source 1..22: mol_type = other RNA
ggtccaggagcgcaggtcctca

SEQ ID NO: 4272 - RNA, 22 nt, synthetic construct
  source 1..22: mol_type = other RNA
ggtcctcattcagggtgagata

SEQ ID NO: 4273 - RNA, 22 nt, synthetic construct
  source 1..22: mol_type = other RNA
ggtctcacaccctgcagtggat

SEQ ID NO: 4274 - RNA, 22 nt, synthetic construct
  source 1..22: mol_type = other RNA
ggtgaagcagcgtctccttccc

SEQ ID NO: 4275 - RNA, 22 nt, synthetic construct
  source 1..22: mol_type = other RNA
ggtgagataatccttgccgtcg

SEQ ID NO: 4276 - RNA, 22 nt, synthetic construct
  source 1..22: mol_type = other RNA
ggtgctccgcctcagaggcatc

SEQ ID NO: 4277 - RNA, 22 nt, synthetic construct
  source 1..22: mol_type = other RNA
ggtggacacggcggctcagatc

SEQ ID NO: 4278 - RNA, 22 nt, synthetic construct
  source 1..22: mol_type = other RNA
ggtgggcgggactgactaaggg

SEQ ID NO: 4279 - RNA, 22 nt, synthetic construct
  source 1..22: mol_type = other RNA
ggtgtgagaccctggccccgcc

SEQ ID NO: 4280 - RNA, 22 nt, synthetic construct
  source 1..22: mol_type = other RNA
gtaagagggtccacagggctac

SEQ ID NO: 4281 - RNA, 22 nt, synthetic construct
  source 1..22: mol_type = other RNA
gtagccctgtggaccctcttac

SEQ ID NO: 4282 - RNA, 22 nt, synthetic construct
  source 1..22: mol_type = other RNA
gtaggcgaactgttcatacccg

SEQ ID NO: 4283 - RNA, 22 nt, synthetic construct
  source 1..22: mol_type = other RNA
gtaggctctctggtgctccgcc

SEQ ID NO: 4284 - RNA, 22 nt, synthetic construct
  source 1..22: mol_type = other RNA
gtatgaacagttcgcctacgac

SEQ ID NO: 4285 - RNA, 22 nt, synthetic construct
  source 1..22: mol_type = other RNA
gtatttgtggagccactccacg

SEQ ID NO: 4286 - RNA, 22 nt, synthetic construct
  source 1..22: mol_type = other RNA
gtcaaatgatgcctctgaggcg

SEQ ID NO: 4287 - RNA, 22 nt, synthetic construct
  source 1..22: mol_type = other RNA
gtcagtcccgcccaccaagccc

SEQ ID NO: 4288 - RNA, 22 nt, synthetic construct
  source 1..22: mol_type = other RNA
gtccacagggctactctcccat

SEQ ID NO: 4289 - RNA, 22 nt, synthetic construct
  source 1..22: mol_type = other RNA
gtccaccgcggtccaggagcgc

SEQ ID NO: 4290 - RNA, 22 nt, synthetic construct
  source 1..22: mol_type = other RNA
gtccaggagcgcaggtcctcat

SEQ ID NO: 4291 - RNA, 22 nt, synthetic construct
  source 1..22: mol_type = other RNA
gtcctcattcagggtgagataa

SEQ ID NO: 4292 - RNA, 22 nt, synthetic construct
  source 1..22: mol_type = other RNA
gtcgggccccagctcgcagcca

SEQ ID NO: 4293 - RNA, 22 nt, synthetic construct
  source 1..22: mol_type = other RNA
gtcgtaggcgaactgttcatac

SEQ ID NO: 4294 - RNA, 22 nt, synthetic construct
  source 1..22: mol_type = other RNA
gtctcacaccctgcagtggatg

SEQ ID NO: 4295 - RNA, 22 nt, synthetic construct
  source 1..22: mol_type = other RNA
gtctccttccccttctccaggt

SEQ ID NO: 4296 - RNA, 22 nt, synthetic construct
  source 1..22: mol_type = other RNA
gtcttccaggtaggctctctgg

SEQ ID NO: 4297 - RNA, 22 nt, synthetic construct
  source 1..22: mol_type = other RNA
gtgaagcagcgtctccttcccc

SEQ ID NO: 4298 - RNA, 22 nt, synthetic construct
  source 1..22: mol_type = other RNA
gtgagaccctggccccgcccct

SEQ ID NO: 4299 - RNA, 22 nt, synthetic construct
  source 1..22: mol_type = other RNA
gtgagataatccttgccgtcgt

SEQ ID NO: 4300 - RNA, 22 nt, synthetic construct
  source 1..22: mol_type = other RNA
gtgctccgcctcagaggcatca

SEQ ID NO: 4301 - RNA, 22 nt, synthetic construct
  source 1..22: mol_type = other RNA
gtggacacggcggctcagatct

SEQ ID NO: 4302 - RNA, 22 nt, synthetic construct
  source 1..22: mol_type = other RNA
gtggaccctcttacccaggtga

SEQ ID NO: 4303 - RNA, 22 nt, synthetic construct
  source 1..22: mol_type = other RNA
gtggagccactccacgcatgtg

SEQ ID NO: 4304 - RNA, 22 nt, synthetic construct
  source 1..22: mol_type = other RNA
gtggagtggctccacaaatacc

SEQ ID NO: 4305 - RNA, 22 nt, synthetic construct
  source 1..22: mol_type = other RNA
gtggatgcatggctgcgagctg

SEQ ID NO: 4306 - RNA, 22 nt, synthetic construct
  source 1..22: mol_type = other RNA
gtggctccacaaatacctggag

SEQ ID NO: 4307 - RNA, 22 nt, synthetic construct
  source 1..22: mol_type = other RNA
gtgggcgggactgactaagggg

SEQ ID NO: 4308 - RNA, 22 nt, synthetic construct
  source 1..22: mol_type = other RNA
gtgtccaccgcggtccaggagc

SEQ ID NO: 4309 - RNA, 22 nt, synthetic construct
  source 1..22: mol_type = other RNA
gtgtcttccaggtaggctctct

SEQ ID NO: 4310 - RNA, 22 nt, synthetic construct
  source 1..22: mol_type = other RNA
gtgtgagaccctggccccgccc

SEQ ID NO: 4311 - RNA, 22 nt, synthetic construct
  source 1..22: mol_type = other RNA
gttcgcctacgacggcaaggat

SEQ ID NO: 4312 - RNA, 22 nt, synthetic construct
  source 1..22: mol_type = other RNA
taagagggtccacagggctact

SEQ ID NO: 4313 - RNA, 22 nt, synthetic construct
  source 1..22: mol_type = other RNA
taaggggcggggccagggtctc

SEQ ID NO: 4314 - RNA, 22 nt, synthetic construct
  source 1..22: mol_type = other RNA
taatccttgccgtcgtaggcga

SEQ ID NO: 4315 - RNA, 22 nt, synthetic construct
  source 1..22: mol_type = other RNA
tacccaggtgaagcagcgtctc

SEQ ID NO: 4316 - RNA, 22 nt, synthetic construct
  source 1..22: mol_type = other RNA
tacctggaagacacatgcgtgg

SEQ ID NO: 4317 - RNA, 22 nt, synthetic construct
  source 1..22: mol_type = other RNA
tacctggagaaggggaaggaga

SEQ ID NO: 4318 - RNA, 22 nt, synthetic construct
  source 1..22: mol_type = other RNA
tacgacggcaaggattatctca

SEQ ID NO: 4319 - RNA, 22 nt, synthetic construct
  source 1..22: mol_type = other RNA
tagccctgtggaccctcttacc

SEQ ID NO: 4320 - RNA, 22 nt, synthetic construct
  source 1..22: mol_type = other RNA
taggcgaactgttcatacccgc

SEQ ID NO: 4321 - RNA, 22 nt, synthetic construct
  source 1..22: mol_type = other RNA
taggctctctggtgctccgcct

SEQ ID NO: 4322 - RNA, 22 nt, synthetic construct
  source 1..22: mol_type = other RNA
tagtcagtcccgcccaccaagc

SEQ ID NO: 4323 - RNA, 22 nt, synthetic construct
  source 1..22: mol_type = other RNA
tatctcaccctgaatgaggacc

SEQ ID NO: 4324 - RNA, 22 nt, synthetic construct
  source 1..22: mol_type = other RNA
tatgaacagttcgcctacgacg

SEQ ID NO: 4325 - RNA, 22 nt, synthetic construct
  source 1..22: mol_type = other RNA
tatttgtggagccactccacgc

SEQ ID NO: 4326 - RNA, 22 nt, synthetic construct
  source 1..22: mol_type = other RNA
tcaaatgatgcctctgaggcgg

SEQ ID NO: 4327 - RNA, 22 nt, synthetic construct
  source 1..22: mol_type = other RNA
tcacaccctgcagtggatgcat

SEQ ID NO: 4328 - RNA, 22 nt, synthetic construct
  source 1..22: mol_type = other RNA
tcaccctgaatgaggacctgcg

SEQ ID NO: 4329 - RNA, 22 nt, synthetic construct
  source 1..22: mol_type = other RNA
tcacctgggtaagagggtccac

SEQ ID NO: 4330 - RNA, 22 nt, synthetic construct
  source 1..22: mol_type = other RNA
tcagaggcatcatttgactttt

SEQ ID NO: 4331 - RNA, 22 nt, synthetic construct
  source 1..22: mol_type = other RNA
tcagatctccgagcaaaagtca

SEQ ID NO: 4332 - RNA, 22 nt, synthetic construct
  source 1..22: mol_type = other RNA
tcagggtgagataatccttgcc

SEQ ID NO: 4333 - RNA, 22 nt, synthetic construct
  source 1..22: mol_type = other RNA
tcagtcccgcccaccaagcccc

SEQ ID NO: 4334 - RNA, 22 nt, synthetic construct
  source 1..22: mol_type = other RNA
tcattcagggtgagataatcct

SEQ ID NO: 4335 - RNA, 22 nt, synthetic construct
  source 1..22: mol_type = other RNA
tcatttgacttttgctcggaga

SEQ ID NO: 4336 - RNA, 22 nt, synthetic construct
  source 1..22: mol_type = other RNA
tccacaaatacctggagaaggg

SEQ ID NO: 4337 - RNA, 22 nt, synthetic construct
  source 1..22: mol_type = other RNA
tccaccgcggtccaggagcgca

SEQ ID NO: 4338 - RNA, 22 nt, synthetic construct
  source 1..22: mol_type = other RNA
tccacgcatgtgtcttccaggt

SEQ ID NO: 4339 - RNA, 22 nt, synthetic construct
  source 1..22: mol_type = other RNA
tccactgcagggtgtgagaccc

SEQ ID NO: 4340 - RNA, 22 nt, synthetic construct
  source 1..22: mol_type = other RNA
tccaggagcgcaggtcctcatt

SEQ ID NO: 4341 - RNA, 22 nt, synthetic construct
  source 1..22: mol_type = other RNA
tccaggtaggctctctggtgct

SEQ ID NO: 4342 - RNA, 22 nt, synthetic construct
  source 1..22: mol_type = other RNA
tccaggtatttgtggagccact

SEQ ID NO: 4343 - RNA, 22 nt, synthetic construct
  source 1..22: mol_type = other RNA
tccccttctccaggtatttgtg

SEQ ID NO: 4344 - RNA, 22 nt, synthetic construct
  source 1..22: mol_type = other RNA
tccgagcaaaagtcaaatgatg

SEQ ID NO: 4345 - RNA, 22 nt, synthetic construct
  source 1..22: mol_type = other RNA
tccgcctcagaggcatcatttg

SEQ ID NO: 4346 - RNA, 22 nt, synthetic construct
  source 1..22: mol_type = other RNA
tccgcgggtatgaacagttcgc

SEQ ID NO: 4347 - RNA, 22 nt, synthetic construct
  source 1..22: mol_type = other RNA
tcctcattcagggtgagataat

SEQ ID NO: 4348 - RNA, 22 nt, synthetic construct
  source 1..22: mol_type = other RNA
tcctccgcgggtatgaacagtt

SEQ ID NO: 4349 - RNA, 22 nt, synthetic construct
  source 1..22: mol_type = other RNA
tcctggaccgcggtggacacgg

SEQ ID NO: 4350 - RNA, 22 nt, synthetic construct
  source 1..22: mol_type = other RNA
tccttccccttctccaggtatt

SEQ ID NO: 4351 - RNA, 22 nt, synthetic construct
  source 1..22: mol_type = other RNA
tccttgccgtcgtaggcgaact

SEQ ID NO: 4352 - RNA, 22 nt, synthetic construct
  source 1..22: mol_type = other RNA
tcgcagccatgcatccactgca

SEQ ID NO: 4353 - RNA, 22 nt, synthetic construct
  source 1..22: mol_type = other RNA
tcgcctacgacggcaaggatta

SEQ ID NO: 4354 - RNA, 22 nt, synthetic construct
  source 1..22: mol_type = other RNA
tcggagatctgagccgccgtgt

SEQ ID NO: 4355 - RNA, 22 nt, synthetic construct
  source 1..22: mol_type = other RNA
tcgggccccagctcgcagccat

SEQ ID NO: 4356 - RNA, 22 nt, synthetic construct
  source 1..22: mol_type = other RNA
tcgtaggcgaactgttcatacc

SEQ ID NO: 4357 - RNA, 22 nt, synthetic construct
  source 1..22: mol_type = other RNA
tctcacaccctgcagtggatgc

SEQ ID NO: 4358 - RNA, 22 nt, synthetic construct
  source 1..22: mol_type = other RNA
tctcaccctgaatgaggacctg

SEQ ID NO: 4359 - RNA, 22 nt, synthetic construct
  source 1..22: mol_type = other RNA
tctccaggtatttgtggagcca

SEQ ID NO: 4360 - RNA, 22 nt, synthetic construct
  source 1..22: mol_type = other RNA
tctccgagcaaaagtcaaatga

SEQ ID NO: 4361 - RNA, 22 nt, synthetic construct
  source 1..22: mol_type = other RNA
tctccttccccttctccaggta

SEQ ID NO: 4362 - RNA, 22 nt, synthetic construct
  source 1..22: mol_type = other RNA
tctctggtgctccgcctcagag

SEQ ID NO: 4363 - RNA, 22 nt, synthetic construct
  source 1..22: mol_type = other RNA
tctgagccgccgtgtccaccgc

SEQ ID NO: 4364 - RNA, 22 nt, synthetic construct
  source 1..22: mol_type = other RNA
tctgaggcggagcaccagagag

SEQ ID NO: 4365 - RNA, 22 nt, synthetic construct
  source 1..22: mol_type = other RNA
tctggtgctccgcctcagaggc

SEQ ID NO: 4366 - RNA, 22 nt, synthetic construct
  source 1..22: mol_type = other RNA
tcttacccaggtgaagcagcgt

SEQ ID NO: 4367 - RNA, 22 nt, synthetic construct
  source 1..22: mol_type = other RNA
tcttccaggtaggctctctggt

SEQ ID NO: 4368 - RNA, 22 nt, synthetic construct
  source 1..22: mol_type = other RNA
tgaacagttcgcctacgacggc

SEQ ID NO: 4369 - RNA, 22 nt, synthetic construct
  source 1..22: mol_type = other RNA
tgaagcagcgtctccttcccct

SEQ ID NO: 4370 - RNA, 22 nt, synthetic construct
  source 1..22: mol_type = other RNA
tgaatgaggacctgcgctcctg

SEQ ID NO: 4371 - RNA, 22 nt, synthetic construct
  source 1..22: mol_type = other RNA
tgactaaggggcggggccaggg

SEQ ID NO: 4372 - RNA, 22 nt, synthetic construct
  source 1..22: mol_type = other RNA
tgacttttgctcggagatctga

SEQ ID NO: 4373 - RNA, 22 nt, synthetic construct
  source 1..22: mol_type = other RNA
tgagaccctggccccgcccctt

SEQ ID NO: 4374 - RNA, 22 nt, synthetic construct
  source 1..22: mol_type = other RNA
tgagataatccttgccgtcgta

SEQ ID NO: 4375 - RNA, 22 nt, synthetic construct
  source 1..22: mol_type = other RNA
tgagccgccgtgtccaccgcgg

SEQ ID NO: 4376 - RNA, 22 nt, synthetic construct
  source 1..22: mol_type = other RNA
tgaggacctgcgctcctggacc

SEQ ID NO: 4377 - RNA, 22 nt, synthetic construct
  source 1..22: mol_type = other RNA
tgaggcggagcaccagagagcc

SEQ ID NO: 4378 - RNA, 22 nt, synthetic construct
  source 1..22: mol_type = other RNA
tgatgcctctgaggcggagcac

SEQ ID NO: 4379 - RNA, 22 nt, synthetic construct
  source 1..22: mol_type = other RNA
tgcagggtgtgagaccctggcc

SEQ ID NO: 4380 - RNA, 22 nt, synthetic construct
  source 1..22: mol_type = other RNA
tgcagtggatgcatggctgcga

SEQ ID NO: 4381 - RNA, 22 nt, synthetic construct
  source 1..22: mol_type = other RNA
tgcatccactgcagggtgtgag

SEQ ID NO: 4382 - RNA, 22 nt, synthetic construct
  source 1..22: mol_type = other RNA
tgcatggctgcgagctggggcc

SEQ ID NO: 4383 - RNA, 22 nt, synthetic construct
  source 1..22: mol_type = other RNA
tgcccacagggtggtggcgacg

SEQ ID NO: 4384 - RNA, 22 nt, synthetic construct
  source 1..22: mol_type = other RNA
tgccgtcgtaggcgaactgttc

SEQ ID NO: 4385 - RNA, 22 nt, synthetic construct
  source 1..22: mol_type = other RNA
tgcctctgaggcggagcaccag

SEQ ID NO: 4386 - RNA, 22 nt, synthetic construct
  source 1..22: mol_type = other RNA
tgcgctcctggaccgcggtgga

SEQ ID NO: 4387 - RNA, 22 nt, synthetic construct
  source 1..22: mol_type = other RNA
tgcgtggagtggctccacaaat

SEQ ID NO: 4388 - RNA, 22 nt, synthetic construct
  source 1..22: mol_type = other RNA
tgctccgcctcagaggcatcat

SEQ ID NO: 4389 - RNA, 22 nt, synthetic construct
  source 1..22: mol_type = other RNA
tgctcggagatctgagccgccg

SEQ ID NO: 4390 - RNA, 22 nt, synthetic construct
  source 1..22: mol_type = other RNA
tgcttcacctgggtaagagggt

SEQ ID NO: 4391 - RNA, 22 nt, synthetic construct
  source 1..22: mol_type = other RNA
tggaagacacatgcgtggagtg

SEQ ID NO: 4392 - RNA, 22 nt, synthetic construct
  source 1..22: mol_type = other RNA
tggacacggcggctcagatctc

SEQ ID NO: 4393 - RNA, 22 nt, synthetic construct
  source 1..22: mol_type = other RNA
tggaccctcttacccaggtgaa

SEQ ID NO: 4394 - RNA, 22 nt, synthetic construct
  source 1..22: mol_type = other RNA
tggaccgcggtggacacggcgg

SEQ ID NO: 4395 - RNA, 22 nt, synthetic construct
  source 1..22: mol_type = other RNA
tggagaaggggaaggagacgct

SEQ ID NO: 4396 - RNA, 22 nt, synthetic construct
  source 1..22: mol_type = other RNA
tggagccactccacgcatgtgt

SEQ ID NO: 4397 - RNA, 22 nt, synthetic construct
  source 1..22: mol_type = other RNA
tggagtggctccacaaatacct

SEQ ID NO: 4398 - RNA, 22 nt, synthetic construct
  source 1..22: mol_type = other RNA
tggatgcatggctgcgagctgg

SEQ ID NO: 4399 - RNA, 22 nt, synthetic construct
  source 1..22: mol_type = other RNA
tggccccgccccttagtcagtc

SEQ ID NO: 4400 - RNA, 22 nt, synthetic construct
  source 1..22: mol_type = other RNA
tggctccacaaatacctggaga

SEQ ID NO: 4401 - RNA, 22 nt, synthetic construct
  source 1..22: mol_type = other RNA
tggctgcgagctggggcccgac

SEQ ID NO: 4402 - RNA, 22 nt, synthetic construct
  source 1..22: mol_type = other RNA
tgggagagtagccctgtggacc

SEQ ID NO: 4403 - RNA, 22 nt, synthetic construct
  source 1..22: mol_type = other RNA
tgggcgggactgactaaggggc

SEQ ID NO: 4404 - RNA, 22 nt, synthetic construct
  source 1..22: mol_type = other RNA
tgggtaagagggtccacagggc

SEQ ID NO: 4405 - RNA, 22 nt, synthetic construct
  source 1..22: mol_type = other RNA
tggtgctccgcctcagaggcat

SEQ ID NO: 4406 - RNA, 22 nt, synthetic construct
  source 1..22: mol_type = other RNA
tggtgggcgggactgactaagg

SEQ ID NO: 4407 - RNA, 22 nt, synthetic construct
  source 1..22: mol_type = other RNA
tgtccaccgcggtccaggagcg

SEQ ID NO: 4408 - RNA, 22 nt, synthetic construct
  source 1..22: mol_type = other RNA
tgtcttccaggtaggctctctg

SEQ ID NO: 4409 - RNA, 22 nt, synthetic construct
  source 1..22: mol_type = other RNA
tgtgagaccctggccccgcccc

SEQ ID NO: 4410 - RNA, 22 nt, synthetic construct
  source 1..22: mol_type = other RNA
tgtggaccctcttacccaggtg

SEQ ID NO: 4411 - RNA, 22 nt, synthetic construct
  source 1..22: mol_type = other RNA
tgtggagccactccacgcatgt

SEQ ID NO: 4412 - RNA, 22 nt, synthetic construct
  source 1..22: mol_type = other RNA
tgtgtcttccaggtaggctctc

SEQ ID NO: 4413 - RNA, 22 nt, synthetic construct
  source 1..22: mol_type = other RNA
ttacccaggtgaagcagcgtct

SEQ ID NO: 4414 - RNA, 22 nt, synthetic construct
  source 1..22: mol_type = other RNA
ttagtcagtcccgcccaccaag

SEQ ID NO: 4415 - RNA, 22 nt, synthetic construct
  source 1..22: mol_type = other RNA
ttatctcaccctgaatgaggac

SEQ ID NO: 4416 - RNA, 22 nt, synthetic construct
  source 1..22: mol_type = other RNA
ttcacctgggtaagagggtcca

SEQ ID NO: 4417 - RNA, 22 nt, synthetic construct
  source 1..22: mol_type = other RNA
ttcagggtgagataatccttgc

SEQ ID NO: 4418 - RNA, 22 nt, synthetic construct
  source 1..22: mol_type = other RNA
ttccaggtaggctctctggtgc

SEQ ID NO: 4419 - RNA, 22 nt, synthetic construct
  source 1..22: mol_type = other RNA
ttccccttctccaggtatttgt

SEQ ID NO: 4420 - RNA, 22 nt, synthetic construct
  source 1..22: mol_type = other RNA
ttcctccgcgggtatgaacagt

SEQ ID NO: 4421 - RNA, 22 nt, synthetic construct
  source 1..22: mol_type = other RNA
ttcgcctacgacggcaaggatt

SEQ ID NO: 4422 - RNA, 22 nt, synthetic construct
  source 1..22: mol_type = other RNA
ttctccaggtatttgtggagcc

SEQ ID NO: 4423 - RNA, 22 nt, synthetic construct
  source 1..22: mol_type = other RNA
ttgacttttgctcggagatctg

SEQ ID NO: 4424 - RNA, 22 nt, synthetic construct
  source 1..22: mol_type = other RNA
ttgccgtcgtaggcgaactgtt

SEQ ID NO: 4425 - RNA, 22 nt, synthetic construct
  source 1..22: mol_type = other RNA
ttgctcggagatctgagccgcc

SEQ ID NO: 4426 - RNA, 22 nt, synthetic construct
  source 1..22: mol_type = other RNA
ttggtgggcgggactgactaag

SEQ ID NO: 4427 - RNA, 22 nt, synthetic construct
  source 1..22: mol_type = other RNA
ttgtggagccactccacgcatg

SEQ ID NO: 4428 - RNA, 22 nt, synthetic construct
  source 1..22: mol_type = other RNA
tttgacttttgctcggagatct

SEQ ID NO: 4429 - RNA, 22 nt, synthetic construct
  source 1..22: mol_type = other RNA
tttgctcggagatctgagccgc

SEQ ID NO: 4430 - RNA, 22 nt, synthetic construct
  source 1..22: mol_type = other RNA
tttgtggagccactccacgcat

SEQ ID NO: 4431 - RNA, 22 nt, synthetic construct
  source 1..22: mol_type = other RNA
ttttgctcggagatctgagccg

SEQ ID NO: 4432 - RNA, 20 nt, synthetic construct
  source 1..20: mol_type = other RNA
aaaattcaggcactttgtat

SEQ ID NO: 4433 - RNA, 20 nt, synthetic construct
  source 1..20: mol_type = other RNA
aaagacacacgtgactcacc

SEQ ID NO: 4434 - RNA, 20 nt, synthetic construct
  source 1..20: mol_type = other RNA
aaattcaggcactttgtatc

SEQ ID NO: 4435 - RNA, 20 nt, synthetic construct
  source 1..20: mol_type = other RNA
aagacacacgtgactcacca

SEQ ID NO: 4436 - RNA, 20 nt, synthetic construct
  source 1..20: mol_type = other RNA
aagagacatgacctcccatc

SEQ ID NO: 4437 - RNA, 20 nt, synthetic construct
  source 1..20: mol_type = other RNA
aagagtcagaaaattcaggc

SEQ ID NO: 4438 - RNA, 20 nt, synthetic construct
  source 1..20: mol_type = other RNA
aaggagggggatgggaggtc

SEQ ID NO: 4439 - RNA, 20 nt, synthetic construct
  source 1..20: mol_type = other RNA
aattcaggcactttgtatct

SEQ ID NO: 4440 - RNA, 20 nt, synthetic construct
  source 1..20: mol_type = other RNA
aattttctgactcttcccct

SEQ ID NO: 4441 - RNA, 20 nt, synthetic construct
  source 1..20: mol_type = other RNA
acaaagtgcctgaattttct

SEQ ID NO: 4442 - RNA, 20 nt, synthetic construct
  source 1..20: mol_type = other RNA
acacacgtgactcaccaccc

SEQ ID NO: 4443 - RNA, 20 nt, synthetic construct
  source 1..20: mol_type = other RNA
acacgtgactcaccacccca

SEQ ID NO: 4444 - RNA, 20 nt, synthetic construct
  source 1..20: mol_type = other RNA
acatgacctcccatccccct

SEQ ID NO: 4445 - RNA, 20 nt, synthetic construct
  source 1..20: mol_type = other RNA
acccgagcccgtcaccctga

SEQ ID NO: 4446 - RNA, 20 nt, synthetic construct
  source 1..20: mol_type = other RNA
accctgagatggagtaagga

SEQ ID NO: 4447 - RNA, 20 nt, synthetic construct
  source 1..20: mol_type = other RNA
acctcccatccccctcctta

SEQ ID NO: 4448 - RNA, 20 nt, synthetic construct
  source 1..20: mol_type = other RNA
acctggcagcaggatgggga

SEQ ID NO: 4449 - RNA, 20 nt, synthetic construct
  source 1..20: mol_type = other RNA
acgagctccgtgtcctgggt

SEQ ID NO: 4450 - RNA, 20 nt, synthetic construct
  source 1..20: mol_type = other RNA
acgggctcgggtagcccctc

SEQ ID NO: 4451 - RNA, 20 nt, synthetic construct
  source 1..20: mol_type = other RNA
acgtgactcaccaccccatc

SEQ ID NO: 4452 - RNA, 20 nt, synthetic construct
  source 1..20: mol_type = other RNA
acgtgccatgtgcagcatga

SEQ ID NO: 4453 - RNA, 20 nt, synthetic construct
  source 1..20: mol_type = other RNA
acgtgtgtctttgggggctc

SEQ ID NO: 4454 - RNA, 20 nt, synthetic construct
  source 1..20: mol_type = other RNA
actcaccaccccatctctga

SEQ ID NO: 4455 - RNA, 20 nt, synthetic construct
  source 1..20: mol_type = other RNA
actccatctcagggtgacgg

SEQ ID NO: 4456 - RNA, 20 nt, synthetic construct
  source 1..20: mol_type = other RNA
actcttcccctcagagcccc

SEQ ID NO: 4457 - RNA, 20 nt, synthetic construct
  source 1..20: mol_type = other RNA
actgacctggcagcaggatg

SEQ ID NO: 4458 - RNA, 20 nt, synthetic construct
  source 1..20: mol_type = other RNA
actttgtatctctcatggga

SEQ ID NO: 4459 - RNA, 20 nt, synthetic construct
  source 1..20: mol_type = other RNA
agaaaattcaggcactttgt

SEQ ID NO: 4460 - RNA, 20 nt, synthetic construct
  source 1..20: mol_type = other RNA
agaagagacatgacctccca

SEQ ID NO: 4461 - RNA, 20 nt, synthetic construct
  source 1..20: mol_type = other RNA
agacacacgtgactcaccac

SEQ ID NO: 4462 - RNA, 20 nt, synthetic construct
  source 1..20: mol_type = other RNA
agacatgacctcccatcccc

SEQ ID NO: 4463 - RNA, 20 nt, synthetic construct
  source 1..20: mol_type = other RNA
agagacatgacctcccatcc

SEQ ID NO: 4464 - RNA, 20 nt, synthetic construct
  source 1..20: mol_type = other RNA
agagatacaaagtgcctgaa

SEQ ID NO: 4465 - RNA, 20 nt, synthetic construct
  source 1..20: mol_type = other RNA
agagatggggtggtgagtca

SEQ ID NO: 4466 - RNA, 20 nt, synthetic construct
  source 1..20: mol_type = other RNA
agagcccccaaagacacacg

SEQ ID NO: 4467 - RNA, 20 nt, synthetic construct
  source 1..20: mol_type = other RNA
agagtcagaaaattcaggca

SEQ ID NO: 4468 - RNA, 20 nt, synthetic construct
  source 1..20: mol_type = other RNA
agatacaaagtgcctgaatt

SEQ ID NO: 4469 - RNA, 20 nt, synthetic construct
  source 1..20: mol_type = other RNA
agatggagtaaggaggggga

SEQ ID NO: 4470 - RNA, 20 nt, synthetic construct
  source 1..20: mol_type = other RNA
agatggggtggtgagtcacg

SEQ ID NO: 4471 - RNA, 20 nt, synthetic construct
  source 1..20: mol_type = other RNA
agcaggatggggagggccat

SEQ ID NO: 4472 - RNA, 20 nt, synthetic construct
  source 1..20: mol_type = other RNA
agcatgaggggctacccgag

SEQ ID NO: 4473 - RNA, 20 nt, synthetic construct
  source 1..20: mol_type = other RNA
agcccccaaagacacacgtg

SEQ ID NO: 4474 - RNA, 20 nt, synthetic construct
  source 1..20: mol_type = other RNA
agcccgtcaccctgagatgg

SEQ ID NO: 4475 - RNA, 20 nt, synthetic construct
  source 1..20: mol_type = other RNA
agctccgtgtcctgggtatg

SEQ ID NO: 4476 - RNA, 20 nt, synthetic construct
  source 1..20: mol_type = other RNA
aggagggggatgggaggtca

SEQ ID NO: 4477 - RNA, 20 nt, synthetic construct
  source 1..20: mol_type = other RNA
aggatggggagggccatacc

SEQ ID NO: 4478 - RNA, 20 nt, synthetic construct
  source 1..20: mol_type = other RNA
aggcactttgtatctctcat

SEQ ID NO: 4479 - RNA, 20 nt, synthetic construct
  source 1..20: mol_type = other RNA
agggccatacccaggacacg

SEQ ID NO: 4480 - RNA, 20 nt, synthetic construct
  source 1..20: mol_type = other RNA
aggggctacccgagcccgtc

SEQ ID NO: 4481 - RNA, 20 nt, synthetic construct
  source 1..20: mol_type = other RNA
agggggatgggaggtcatgt

SEQ ID NO: 4482 - RNA, 20 nt, synthetic construct
  source 1..20: mol_type = other RNA
agggtgacgggctcgggtag

SEQ ID NO: 4483 - RNA, 20 nt, synthetic construct
  source 1..20: mol_type = other RNA
agtaaggagggggatgggag

SEQ ID NO: 4484 - RNA, 20 nt, synthetic construct
  source 1..20: mol_type = other RNA
agtcacgtgtgtctttgggg

SEQ ID NO: 4485 - RNA, 20 nt, synthetic construct
  source 1..20: mol_type = other RNA
agtcagaaaattcaggcact

SEQ ID NO: 4486 - RNA, 20 nt, synthetic construct
  source 1..20: mol_type = other RNA
agtgtcccatgagagataca

SEQ ID NO: 4487 - RNA, 20 nt, synthetic construct
  source 1..20: mol_type = other RNA
atacaaagtgcctgaatttt

SEQ ID NO: 4488 - RNA, 20 nt, synthetic construct
  source 1..20: mol_type = other RNA
atacccaggacacggagctc

SEQ ID NO: 4489 - RNA, 20 nt, synthetic construct
  source 1..20: mol_type = other RNA
atccccctccttactccatc

SEQ ID NO: 4490 - RNA, 20 nt, synthetic construct
  source 1..20: mol_type = other RNA
atctcagggtgacgggctcg

SEQ ID NO: 4491 - RNA, 20 nt, synthetic construct
  source 1..20: mol_type = other RNA
atgacctcccatccccctcc

SEQ ID NO: 4492 - RNA, 20 nt, synthetic construct
  source 1..20: mol_type = other RNA
atgagagatacaaagtgcct

SEQ ID NO: 4493 - RNA, 20 nt, synthetic construct
  source 1..20: mol_type = other RNA
atgaggggctacccgagccc

SEQ ID NO: 4494 - RNA, 20 nt, synthetic construct
  source 1..20: mol_type = other RNA
atggagtaaggagggggatg

SEQ ID NO: 4495 - RNA, 20 nt, synthetic construct
  source 1..20: mol_type = other RNA
atggccctccccatcctgct

SEQ ID NO: 4496 - RNA, 20 nt, synthetic construct
  source 1..20: mol_type = other RNA
atggggagggccatacccag

SEQ ID NO: 4497 - RNA, 20 nt, synthetic construct
  source 1..20: mol_type = other RNA
atggggtggtgagtcacgtg

SEQ ID NO: 4498 - RNA, 20 nt, synthetic construct
  source 1..20: mol_type = other RNA
atgggtgctgctggagtgtc

SEQ ID NO: 4499 - RNA, 20 nt, synthetic construct
  source 1..20: mol_type = other RNA
atggtcagagatggggtggt

SEQ ID NO: 4500 - RNA, 20 nt, synthetic construct
  source 1..20: mol_type = other RNA
atgtgcagcatgaggggcta

SEQ ID NO: 4501 - RNA, 20 nt, synthetic construct
  source 1..20: mol_type = other RNA
attcaggcactttgtatctc

SEQ ID NO: 4502 - RNA, 20 nt, synthetic construct
  source 1..20: mol_type = other RNA
attttctgactcttcccctc

SEQ ID NO: 4503 - RNA, 20 nt, synthetic construct
  source 1..20: mol_type = other RNA
caaagacacacgtgactcac

SEQ ID NO: 4504 - RNA, 20 nt, synthetic construct
  source 1..20: mol_type = other RNA
cacacgtgactcaccacccc

SEQ ID NO: 4505 - RNA, 20 nt, synthetic construct
  source 1..20: mol_type = other RNA
caccctgagatggagtaagg

SEQ ID NO: 4506 - RNA, 20 nt, synthetic construct
  source 1..20: mol_type = other RNA
cacgagctccgtgtcctggg

SEQ ID NO: 4507 - RNA, 20 nt, synthetic construct
  source 1..20: mol_type = other RNA
cacgtgactcaccaccccat

SEQ ID NO: 4508 - RNA, 20 nt, synthetic construct
  source 1..20: mol_type = other RNA
cacgtgccatgtgcagcatg

SEQ ID NO: 4509 - RNA, 20 nt, synthetic construct
  source 1..20: mol_type = other RNA
cacgtgtgtctttgggggct

SEQ ID NO: 4510 - RNA, 20 nt, synthetic construct
  source 1..20: mol_type = other RNA
cactgacctggcagcaggat

SEQ ID NO: 4511 - RNA, 20 nt, synthetic construct
  source 1..20: mol_type = other RNA
cactttgtatctctcatggg

SEQ ID NO: 4512 - RNA, 20 nt, synthetic construct
  source 1..20: mol_type = other RNA
cagaaaattcaggcactttg

SEQ ID NO: 4513 - RNA, 20 nt, synthetic construct
  source 1..20: mol_type = other RNA
cagagatggggtggtgagtc

SEQ ID NO: 4514 - RNA, 20 nt, synthetic construct
  source 1..20: mol_type = other RNA
cagagcccccaaagacacac

SEQ ID NO: 4515 - RNA, 20 nt, synthetic construct
  source 1..20: mol_type = other RNA
cagcaggatggggagggcca

SEQ ID NO: 4516 - RNA, 20 nt, synthetic construct
  source 1..20: mol_type = other RNA
cagcatgaggggctacccga

SEQ ID NO: 4517 - RNA, 20 nt, synthetic construct
  source 1..20: mol_type = other RNA
caggatggggagggccatac

SEQ ID NO: 4518 - RNA, 20 nt, synthetic construct
  source 1..20: mol_type = other RNA
caggcactttgtatctctca

SEQ ID NO: 4519 - RNA, 20 nt, synthetic construct
  source 1..20: mol_type = other RNA
cagggtgacgggctcgggta

SEQ ID NO: 4520 - RNA, 20 nt, synthetic construct
  source 1..20: mol_type = other RNA
catacccaggacacggagct

SEQ ID NO: 4521 - RNA, 20 nt, synthetic construct
  source 1..20: mol_type = other RNA
catccccctccttactccat

SEQ ID NO: 4522 - RNA, 20 nt, synthetic construct
  source 1..20: mol_type = other RNA
catctcagggtgacgggctc

SEQ ID NO: 4523 - RNA, 20 nt, synthetic construct
  source 1..20: mol_type = other RNA
catgacctcccatccccctc

SEQ ID NO: 4524 - RNA, 20 nt, synthetic construct
  source 1..20: mol_type = other RNA
catgagagatacaaagtgcc

SEQ ID NO: 4525 - RNA, 20 nt, synthetic construct
  source 1..20: mol_type = other RNA
catgaggggctacccgagcc

SEQ ID NO: 4526 - RNA, 20 nt, synthetic construct
  source 1..20: mol_type = other RNA
catggtcagagatggggtgg

SEQ ID NO: 4527 - RNA, 20 nt, synthetic construct
  source 1..20: mol_type = other RNA
catgtgcagcatgaggggct

SEQ ID NO: 4528 - RNA, 20 nt, synthetic construct
  source 1..20: mol_type = other RNA
ccaaagacacacgtgactca

SEQ ID NO: 4529 - RNA, 20 nt, synthetic construct
  source 1..20: mol_type = other RNA
ccacgagctccgtgtcctgg

SEQ ID NO: 4530 - RNA, 20 nt, synthetic construct
  source 1..20: mol_type = other RNA
ccatacccaggacacggagc

SEQ ID NO: 4531 - RNA, 20 nt, synthetic construct
  source 1..20: mol_type = other RNA
ccatccccctccttactcca

SEQ ID NO: 4532 - RNA, 20 nt, synthetic construct
  source 1..20: mol_type = other RNA
ccatctcagggtgacgggct

SEQ ID NO: 4533 - RNA, 20 nt, synthetic construct
  source 1..20: mol_type = other RNA
ccatgagagatacaaagtgc

SEQ ID NO: 4534 - RNA, 20 nt, synthetic construct
  source 1..20: mol_type = other RNA
ccatgtgcagcatgaggggc

SEQ ID NO: 4535 - RNA, 20 nt, synthetic construct
  source 1..20: mol_type = other RNA
cccaaagacacacgtgactc

SEQ ID NO: 4536 - RNA, 20 nt, synthetic construct
  source 1..20: mol_type = other RNA
cccatccccctccttactcc

SEQ ID NO: 4537 - RNA, 20 nt, synthetic construct
  source 1..20: mol_type = other RNA
cccatgagagatacaaagtg

SEQ ID NO: 4538 - RNA, 20 nt, synthetic construct
  source 1..20: mol_type = other RNA
ccccaaagacacacgtgact

SEQ ID NO: 4539 - RNA, 20 nt, synthetic construct
  source 1..20: mol_type = other RNA
cccccaaagacacacgtgac

SEQ ID NO: 4540 - RNA, 20 nt, synthetic construct
  source 1..20: mol_type = other RNA
ccccctccttactccatctc

SEQ ID NO: 4541 - RNA, 20 nt, synthetic construct
  source 1..20: mol_type = other RNA
cccctcagagcccccaaaga

SEQ ID NO: 4542 - RNA, 20 nt, synthetic construct
  source 1..20: mol_type = other RNA
cccctccttactccatctca

SEQ ID NO: 4543 - RNA, 20 nt, synthetic construct
  source 1..20: mol_type = other RNA
cccgagcccgtcaccctgag

SEQ ID NO: 4544 - RNA, 20 nt, synthetic construct
  source 1..20: mol_type = other RNA
cccgtcaccctgagatggag

SEQ ID NO: 4545 - RNA, 20 nt, synthetic construct
  source 1..20: mol_type = other RNA
ccctcagagcccccaaagac

SEQ ID NO: 4546 - RNA, 20 nt, synthetic construct
  source 1..20: mol_type = other RNA
ccctccccatcctgctgcca

SEQ ID NO: 4547 - RNA, 20 nt, synthetic construct
  source 1..20: mol_type = other RNA
ccctccttactccatctcag

SEQ ID NO: 4548 - RNA, 20 nt, synthetic construct
  source 1..20: mol_type = other RNA
ccctgagaagagacatgacc

SEQ ID NO: 4549 - RNA, 20 nt, synthetic construct
  source 1..20: mol_type = other RNA
ccctgagatggagtaaggag

SEQ ID NO: 4550 - RNA, 20 nt, synthetic construct
  source 1..20: mol_type = other RNA
ccgagcccgtcaccctgaga

SEQ ID NO: 4551 - RNA, 20 nt, synthetic construct
  source 1..20: mol_type = other RNA
ccgtcaccctgagatggagt

SEQ ID NO: 4552 - RNA, 20 nt, synthetic construct
  source 1..20: mol_type = other RNA
ccgtgtcctgggtatggccc

SEQ ID NO: 4553 - RNA, 20 nt, synthetic construct
  source 1..20: mol_type = other RNA
cctcagagcccccaaagaca

SEQ ID NO: 4554 - RNA, 20 nt, synthetic construct
  source 1..20: mol_type = other RNA
cctcatggtcagagatgggg

SEQ ID NO: 4555 - RNA, 20 nt, synthetic construct
  source 1..20: mol_type = other RNA
cctcccatccccctccttac

SEQ ID NO: 4556 - RNA, 20 nt, synthetic construct
  source 1..20: mol_type = other RNA
cctccttactccatctcagg

SEQ ID NO: 4557 - RNA, 20 nt, synthetic construct
  source 1..20: mol_type = other RNA
cctgagaagagacatgacct

SEQ ID NO: 4558 - RNA, 20 nt, synthetic construct
  source 1..20: mol_type = other RNA
cctgagatggagtaaggagg

SEQ ID NO: 4559 - RNA, 20 nt, synthetic construct
  source 1..20: mol_type = other RNA
cctggcagcaggatggggag

SEQ ID NO: 4560 - RNA, 20 nt, synthetic construct
  source 1..20: mol_type = other RNA
cctgggtatggccctcccca

SEQ ID NO: 4561 - RNA, 20 nt, synthetic construct
  source 1..20: mol_type = other RNA
ccttactccatctcagggtg

SEQ ID NO: 4562 - RNA, 20 nt, synthetic construct
  source 1..20: mol_type = other RNA
cgagcccgtcaccctgagat

SEQ ID NO: 4563 - RNA, 20 nt, synthetic construct
  source 1..20: mol_type = other RNA
cgagctccgtgtcctgggta

SEQ ID NO: 4564 - RNA, 20 nt, synthetic construct
  source 1..20: mol_type = other RNA
cgggctcgggtagcccctca

SEQ ID NO: 4565 - RNA, 20 nt, synthetic construct
  source 1..20: mol_type = other RNA
cgggtagcccctcatgctgc

SEQ ID NO: 4566 - RNA, 20 nt, synthetic construct
  source 1..20: mol_type = other RNA
cgtcaccctgagatggagta

SEQ ID NO: 4567 - RNA, 20 nt, synthetic construct
  source 1..20: mol_type = other RNA
cgtgactcaccaccccatct

SEQ ID NO: 4568 - RNA, 20 nt, synthetic construct
  source 1..20: mol_type = other RNA
cgtgccatgtgcagcatgag

SEQ ID NO: 4569 - RNA, 20 nt, synthetic construct
  source 1..20: mol_type = other RNA
cgtgtcctgggtatggccct

SEQ ID NO: 4570 - RNA, 20 nt, synthetic construct
  source 1..20: mol_type = other RNA
cgtgtgtctttgggggctct

SEQ ID NO: 4571 - RNA, 20 nt, synthetic construct
  source 1..20: mol_type = other RNA
ctacccgagcccgtcaccct

SEQ ID NO: 4572 - RNA, 20 nt, synthetic construct
  source 1..20: mol_type = other RNA
ctcaccaccccatctctgac

SEQ ID NO: 4573 - RNA, 20 nt, synthetic construct
  source 1..20: mol_type = other RNA
ctcagagcccccaaagacac

SEQ ID NO: 4574 - RNA, 20 nt, synthetic construct
  source 1..20: mol_type = other RNA
ctcagggtgacgggctcggg

SEQ ID NO: 4575 - RNA, 20 nt, synthetic construct
  source 1..20: mol_type = other RNA
ctcatggtcagagatggggt

SEQ ID NO: 4576 - RNA, 20 nt, synthetic construct
  source 1..20: mol_type = other RNA
ctccacgagctccgtgtcct

SEQ ID NO: 4577 - RNA, 20 nt, synthetic construct
  source 1..20: mol_type = other RNA
ctccatctcagggtgacggg

SEQ ID NO: 4578 - RNA, 20 nt, synthetic construct
  source 1..20: mol_type = other RNA
ctcccatccccctccttact

SEQ ID NO: 4579 - RNA, 20 nt, synthetic construct
  source 1..20: mol_type = other RNA
ctccgtgtcctgggtatggc

SEQ ID NO: 4580 - RNA, 20 nt, synthetic construct
  source 1..20: mol_type = other RNA
ctccttactccatctcaggg

SEQ ID NO: 4581 - RNA, 20 nt, synthetic construct
  source 1..20: mol_type = other RNA
ctcgggtagcccctcatgct

SEQ ID NO: 4582 - RNA, 20 nt, synthetic construct
  source 1..20: mol_type = other RNA
ctctcatgggacactccagc

SEQ ID NO: 4583 - RNA, 20 nt, synthetic construct
  source 1..20: mol_type = other RNA
ctctgaggggaagagtcaga

SEQ ID NO: 4584 - RNA, 20 nt, synthetic construct
  source 1..20: mol_type = other RNA
ctcttcccctcagagccccc

SEQ ID NO: 4585 - RNA, 20 nt, synthetic construct
  source 1..20: mol_type = other RNA
ctgaattttctgactcttcc

SEQ ID NO: 4586 - RNA, 20 nt, synthetic construct
  source 1..20: mol_type = other RNA
ctgacctggcagcaggatgg

SEQ ID NO: 4587 - RNA, 20 nt, synthetic construct
  source 1..20: mol_type = other RNA
ctgactcttcccctcagagc

SEQ ID NO: 4588 - RNA, 20 nt, synthetic construct
  source 1..20: mol_type = other RNA
ctgagaagagacatgacctc

SEQ ID NO: 4589 - RNA, 20 nt, synthetic construct
  source 1..20: mol_type = other RNA
ctgagatggagtaaggaggg

SEQ ID NO: 4590 - RNA, 20 nt, synthetic construct
  source 1..20: mol_type = other RNA
ctgctggagtgtcccatgag

SEQ ID NO: 4591 - RNA, 20 nt, synthetic construct
  source 1..20: mol_type = other RNA
ctggagtgtcccatgagaga

SEQ ID NO: 4592 - RNA, 20 nt, synthetic construct
  source 1..20: mol_type = other RNA
ctggcagcaggatggggagg

SEQ ID NO: 4593 - RNA, 20 nt, synthetic construct
  source 1..20: mol_type = other RNA
ctgggtatggccctccccat

SEQ ID NO: 4594 - RNA, 20 nt, synthetic construct
  source 1..20: mol_type = other RNA
cttactccatctcagggtga

SEQ ID NO: 4595 - RNA, 20 nt, synthetic construct
  source 1..20: mol_type = other RNA
cttcccctcagagcccccaa

SEQ ID NO: 4596 - RNA, 20 nt, synthetic construct
  source 1..20: mol_type = other RNA
ctttgggggctctgagggga

SEQ ID NO: 4597 - RNA, 20 nt, synthetic construct
  source 1..20: mol_type = other RNA
ctttgtatctctcatgggac

SEQ ID NO: 4598 - RNA, 20 nt, synthetic construct
  source 1..20: mol_type = other RNA
gaaaattcaggcactttgta

SEQ ID NO: 4599 - RNA, 20 nt, synthetic construct
  source 1..20: mol_type = other RNA
gaagagacatgacctcccat

SEQ ID NO: 4600 - RNA, 20 nt, synthetic construct
  source 1..20: mol_type = other RNA
gaagagtcagaaaattcagg

SEQ ID NO: 4601 - RNA, 20 nt, synthetic construct
  source 1..20: mol_type = other RNA
gaattttctgactcttcccc

SEQ ID NO: 4602 - RNA, 20 nt, synthetic construct
  source 1..20: mol_type = other RNA
gacacacgtgactcaccacc

SEQ ID NO: 4603 - RNA, 20 nt, synthetic construct
  source 1..20: mol_type = other RNA
gacatgacctcccatccccc

SEQ ID NO: 4604 - RNA, 20 nt, synthetic construct
  source 1..20: mol_type = other RNA
gacctcccatccccctcctt

SEQ ID NO: 4605 - RNA, 20 nt, synthetic construct
  source 1..20: mol_type = other RNA
gacctggcagcaggatgggg

SEQ ID NO: 4606 - RNA, 20 nt, synthetic construct
  source 1..20: mol_type = other RNA
gacgggctcgggtagcccct

SEQ ID NO: 4607 - RNA, 20 nt, synthetic construct
  source 1..20: mol_type = other RNA
gactcaccaccccatctctg

SEQ ID NO: 4608 - RNA, 20 nt, synthetic construct
  source 1..20: mol_type = other RNA
gactcttcccctcagagccc

SEQ ID NO: 4609 - RNA, 20 nt, synthetic construct
  source 1..20: mol_type = other RNA
gagaagagacatgacctccc

SEQ ID NO: 4610 - RNA, 20 nt, synthetic construct
  source 1..20: mol_type = other RNA
gagacatgacctcccatccc

SEQ ID NO: 4611 - RNA, 20 nt, synthetic construct
  source 1..20: mol_type = other RNA
gagagatacaaagtgcctga

SEQ ID NO: 4612 - RNA, 20 nt, synthetic construct
  source 1..20: mol_type = other RNA
gagatacaaagtgcctgaat

SEQ ID NO: 4613 - RNA, 20 nt, synthetic construct
  source 1..20: mol_type = other RNA
gagatggagtaaggaggggg

SEQ ID NO: 4614 - RNA, 20 nt, synthetic construct
  source 1..20: mol_type = other RNA
gagatggggtggtgagtcac

SEQ ID NO: 4615 - RNA, 20 nt, synthetic construct
  source 1..20: mol_type = other RNA
gagcccccaaagacacacgt

SEQ ID NO: 4616 - RNA, 20 nt, synthetic construct
  source 1..20: mol_type = other RNA
gagcccgtcaccctgagatg

SEQ ID NO: 4617 - RNA, 20 nt, synthetic construct
  source 1..20: mol_type = other RNA
gagctccgtgtcctgggtat

SEQ ID NO: 4618 - RNA, 20 nt, synthetic construct
  source 1..20: mol_type = other RNA
gagggccatacccaggacac

SEQ ID NO: 4619 - RNA, 20 nt, synthetic construct
  source 1..20: mol_type = other RNA
gaggggctacccgagcccgt

SEQ ID NO: 4620 - RNA, 20 nt, synthetic construct
  source 1..20: mol_type = other RNA
gagggggatgggaggtcatg

SEQ ID NO: 4621 - RNA, 20 nt, synthetic construct
  source 1..20: mol_type = other RNA
gagtaaggagggggatggga

SEQ ID NO: 4622 - RNA, 20 nt, synthetic construct
  source 1..20: mol_type = other RNA
gagtcacgtgtgtctttggg

SEQ ID NO: 4623 - RNA, 20 nt, synthetic construct
  source 1..20: mol_type = other RNA
gagtcagaaaattcaggcac

SEQ ID NO: 4624 - RNA, 20 nt, synthetic construct
  source 1..20: mol_type = other RNA
gagtgtcccatgagagatac

SEQ ID NO: 4625 - RNA, 20 nt, synthetic construct
  source 1..20: mol_type = other RNA
gatacaaagtgcctgaattt

SEQ ID NO: 4626 - RNA, 20 nt, synthetic construct
  source 1..20: mol_type = other RNA
gatggagtaaggagggggat

SEQ ID NO: 4627 - RNA, 20 nt, synthetic construct
  source 1..20: mol_type = other RNA
gatggggagggccataccca

SEQ ID NO: 4628 - RNA, 20 nt, synthetic construct
  source 1..20: mol_type = other RNA
gatggggtggtgagtcacgt

SEQ ID NO: 4629 - RNA, 20 nt, synthetic construct
  source 1..20: mol_type = other RNA
gcactttgtatctctcatgg

SEQ ID NO: 4630 - RNA, 20 nt, synthetic construct
  source 1..20: mol_type = other RNA
gcagcaggatggggagggcc

SEQ ID NO: 4631 - RNA, 20 nt, synthetic construct
  source 1..20: mol_type = other RNA
gcagcatgaggggctacccg

SEQ ID NO: 4632 - RNA, 20 nt, synthetic construct
  source 1..20: mol_type = other RNA
gcaggatggggagggccata

SEQ ID NO: 4633 - RNA, 20 nt, synthetic construct
  source 1..20: mol_type = other RNA
gcatgaggggctacccgagc

SEQ ID NO: 4634 - RNA, 20 nt, synthetic construct
  source 1..20: mol_type = other RNA
gccatacccaggacacggag

SEQ ID NO: 4635 - RNA, 20 nt, synthetic construct
  source 1..20: mol_type = other RNA
gccatgtgcagcatgagggg

SEQ ID NO: 4636 - RNA, 20 nt, synthetic construct
  source 1..20: mol_type = other RNA
gcccccaaagacacacgtga

SEQ ID NO: 4637 - RNA, 20 nt, synthetic construct
  source 1..20: mol_type = other RNA
gcccgtcaccctgagatgga

SEQ ID NO: 4638 - RNA, 20 nt, synthetic construct
  source 1..20: mol_type = other RNA
gccctccccatcctgctgcc

SEQ ID NO: 4639 - RNA, 20 nt, synthetic construct
  source 1..20: mol_type = other RNA
gcctcatggtcagagatggg

SEQ ID NO: 4640 - RNA, 20 nt, synthetic construct
  source 1..20: mol_type = other RNA
gctacccgagcccgtcaccc

SEQ ID NO: 4641 - RNA, 20 nt, synthetic construct
  source 1..20: mol_type = other RNA
gctccgtgtcctgggtatgg

SEQ ID NO: 4642 - RNA, 20 nt, synthetic construct
  source 1..20: mol_type = other RNA
gctcgggtagcccctcatgc

SEQ ID NO: 4643 - RNA, 20 nt, synthetic construct
  source 1..20: mol_type = other RNA
gctctgaggggaagagtcag

SEQ ID NO: 4644 - RNA, 20 nt, synthetic construct
  source 1..20: mol_type = other RNA
gctgctggagtgtcccatga

SEQ ID NO: 4645 - RNA, 20 nt, synthetic construct
  source 1..20: mol_type = other RNA
gctggagtgtcccatgagag

SEQ ID NO: 4646 - RNA, 20 nt, synthetic construct
  source 1..20: mol_type = other RNA
ggagggccatacccaggaca

SEQ ID NO: 4647 - RNA, 20 nt, synthetic construct
  source 1..20: mol_type = other RNA
ggagggggatgggaggtcat

SEQ ID NO: 4648 - RNA, 20 nt, synthetic construct
  source 1..20: mol_type = other RNA
ggagtaaggagggggatggg

SEQ ID NO: 4649 - RNA, 20 nt, synthetic construct
  source 1..20: mol_type = other RNA
ggagtgtcccatgagagata

SEQ ID NO: 4650 - RNA, 20 nt, synthetic construct
  source 1..20: mol_type = other RNA
ggatgggaggtcatgtctct

SEQ ID NO: 4651 - RNA, 20 nt, synthetic construct
  source 1..20: mol_type = other RNA
ggatggggagggccataccc

SEQ ID NO: 4652 - RNA, 20 nt, synthetic construct
  source 1..20: mol_type = other RNA
ggcactttgtatctctcatg

SEQ ID NO: 4653 - RNA, 20 nt, synthetic construct
  source 1..20: mol_type = other RNA
ggcagcaggatggggagggc

SEQ ID NO: 4654 - RNA, 20 nt, synthetic construct
  source 1..20: mol_type = other RNA
ggccatacccaggacacgga

SEQ ID NO: 4655 - RNA, 20 nt, synthetic construct
  source 1..20: mol_type = other RNA
ggccctccccatcctgctgc

SEQ ID NO: 4656 - RNA, 20 nt, synthetic construct
  source 1..20: mol_type = other RNA
ggcctcatggtcagagatgg

SEQ ID NO: 4657 - RNA, 20 nt, synthetic construct
  source 1..20: mol_type = other RNA
ggctacccgagcccgtcacc

SEQ ID NO: 4658 - RNA, 20 nt, synthetic construct
  source 1..20: mol_type = other RNA
ggctcgggtagcccctcatg

SEQ ID NO: 4659 - RNA, 20 nt, synthetic construct
  source 1..20: mol_type = other RNA
ggctctgaggggaagagtca

SEQ ID NO: 4660 - RNA, 20 nt, synthetic construct
  source 1..20: mol_type = other RNA
gggagggccatacccaggac

SEQ ID NO: 4661 - RNA, 20 nt, synthetic construct
  source 1..20: mol_type = other RNA
gggatgggaggtcatgtctc

SEQ ID NO: 4662 - RNA, 20 nt, synthetic construct
  source 1..20: mol_type = other RNA
gggccatacccaggacacgg

SEQ ID NO: 4663 - RNA, 20 nt, synthetic construct
  source 1..20: mol_type = other RNA
gggctacccgagcccgtcac

SEQ ID NO: 4664 - RNA, 20 nt, synthetic construct
  source 1..20: mol_type = other RNA
gggctcgggtagcccctcat

SEQ ID NO: 4665 - RNA, 20 nt, synthetic construct
  source 1..20: mol_type = other RNA
gggctctgaggggaagagtc

SEQ ID NO: 4666 - RNA, 20 nt, synthetic construct
  source 1..20: mol_type = other RNA
ggggagggccatacccagga

SEQ ID NO: 4667 - RNA, 20 nt, synthetic construct
  source 1..20: mol_type = other RNA
ggggatgggaggtcatgtct

SEQ ID NO: 4668 - RNA, 20 nt, synthetic construct
  source 1..20: mol_type = other RNA
ggggctacccgagcccgtca

SEQ ID NO: 4669 - RNA, 20 nt, synthetic construct
  source 1..20: mol_type = other RNA
ggggctctgaggggaagagt

SEQ ID NO: 4670 - RNA, 20 nt, synthetic construct
  source 1..20: mol_type = other RNA
gggggatgggaggtcatgtc

SEQ ID NO: 4671 - RNA, 20 nt, synthetic construct
  source 1..20: mol_type = other RNA
gggggctctgaggggaagag

SEQ ID NO: 4672 - RNA, 20 nt, synthetic construct
  source 1..20: mol_type = other RNA
ggggtggtgagtcacgtgtg

SEQ ID NO: 4673 - RNA, 20 nt, synthetic construct
  source 1..20: mol_type = other RNA
gggtagcccctcatgctgca

SEQ ID NO: 4674 - RNA, 20 nt, synthetic construct
  source 1..20: mol_type = other RNA
gggtatggccctccccatcc

SEQ ID NO: 4675 - RNA, 20 nt, synthetic construct
  source 1..20: mol_type = other RNA
gggtgacgggctcgggtagc

SEQ ID NO: 4676 - RNA, 20 nt, synthetic construct
  source 1..20: mol_type = other RNA
gggtgctgctggagtgtccc

SEQ ID NO: 4677 - RNA, 20 nt, synthetic construct
  source 1..20: mol_type = other RNA
gggtggtgagtcacgtgtgt

SEQ ID NO: 4678 - RNA, 20 nt, synthetic construct
  source 1..20: mol_type = other RNA
ggtagcccctcatgctgcac

SEQ ID NO: 4679 - RNA, 20 nt, synthetic construct
  source 1..20: mol_type = other RNA
ggtatggccctccccatcct

SEQ ID NO: 4680 - RNA, 20 nt, synthetic construct
  source 1..20: mol_type = other RNA
ggtcagagatggggtggtga

SEQ ID NO: 4681 - RNA, 20 nt, synthetic construct
  source 1..20: mol_type = other RNA
ggtctccacgagctccgtgt

SEQ ID NO: 4682 - RNA, 20 nt, synthetic construct
  source 1..20: mol_type = other RNA
ggtgacgggctcgggtagcc

SEQ ID NO: 4683 - RNA, 20 nt, synthetic construct
  source 1..20: mol_type = other RNA
ggtgagtcacgtgtgtcttt

SEQ ID NO: 4684 - RNA, 20 nt, synthetic construct
  source 1..20: mol_type = other RNA
ggtggtgagtcacgtgtgtc

SEQ ID NO: 4685 - RNA, 20 nt, synthetic construct
  source 1..20: mol_type = other RNA
gtaaggagggggatgggagg

SEQ ID NO: 4686 - RNA, 20 nt, synthetic construct
  source 1..20: mol_type = other RNA
gtagcccctcatgctgcaca

SEQ ID NO: 4687 - RNA, 20 nt, synthetic construct
  source 1..20: mol_type = other RNA
gtatctctcatgggacactc

SEQ ID NO: 4688 - RNA, 20 nt, synthetic construct
  source 1..20: mol_type = other RNA
gtatggccctccccatcctg

SEQ ID NO: 4689 - RNA, 20 nt, synthetic construct
  source 1..20: mol_type = other RNA
gtcaccctgagatggagtaa

SEQ ID NO: 4690 - RNA, 20 nt, synthetic construct
  source 1..20: mol_type = other RNA
gtcacgtgtgtctttggggg

SEQ ID NO: 4691 - RNA, 20 nt, synthetic construct
  source 1..20: mol_type = other RNA
gtcagaaaattcaggcactt

SEQ ID NO: 4692 - RNA, 20 nt, synthetic construct
  source 1..20: mol_type = other RNA
gtcagagatggggtggtgag

SEQ ID NO: 4693 - RNA, 20 nt, synthetic construct
  source 1..20: mol_type = other RNA
gtcccatgagagatacaaag

SEQ ID NO: 4694 - RNA, 20 nt, synthetic construct
  source 1..20: mol_type = other RNA
gtcctgggtatggccctccc

SEQ ID NO: 4695 - RNA, 20 nt, synthetic construct
  source 1..20: mol_type = other RNA
gtctccacgagctccgtgtc

SEQ ID NO: 4696 - RNA, 20 nt, synthetic construct
  source 1..20: mol_type = other RNA
gtctttgggggctctgaggg

SEQ ID NO: 4697 - RNA, 20 nt, synthetic construct
  source 1..20: mol_type = other RNA
gtgacgggctcgggtagccc

SEQ ID NO: 4698 - RNA, 20 nt, synthetic construct
  source 1..20: mol_type = other RNA
gtgactcaccaccccatctc

SEQ ID NO: 4699 - RNA, 20 nt, synthetic construct
  source 1..20: mol_type = other RNA
gtgagtcacgtgtgtctttg

SEQ ID NO: 4700 - RNA, 20 nt, synthetic construct
  source 1..20: mol_type = other RNA
gtgcagcatgaggggctacc

SEQ ID NO: 4701 - RNA, 20 nt, synthetic construct
  source 1..20: mol_type = other RNA
gtgccatgtgcagcatgagg

SEQ ID NO: 4702 - RNA, 20 nt, synthetic construct
  source 1..20: mol_type = other RNA
gtgctgctggagtgtcccat

SEQ ID NO: 4703 - RNA, 20 nt, synthetic construct
  source 1..20: mol_type = other RNA
gtggtgagtcacgtgtgtct

SEQ ID NO: 4704 - RNA, 20 nt, synthetic construct
  source 1..20: mol_type = other RNA
gtgtcccatgagagatacaa

SEQ ID NO: 4705 - RNA, 20 nt, synthetic construct
  source 1..20: mol_type = other RNA
gtgtcctgggtatggccctc

SEQ ID NO: 4706 - RNA, 20 nt, synthetic construct
  source 1..20: mol_type = other RNA
gtgtctttgggggctctgag

SEQ ID NO: 4707 - RNA, 20 nt, synthetic construct
  source 1..20: mol_type = other RNA
gtgtgtctttgggggctctg

SEQ ID NO: 4708 - RNA, 20 nt, synthetic construct
  source 1..20: mol_type = other RNA
taaggagggggatgggaggt

SEQ ID NO: 4709 - RNA, 20 nt, synthetic construct
  source 1..20: mol_type = other RNA
tacaaagtgcctgaattttc

SEQ ID NO: 4710 - RNA, 20 nt, synthetic construct
  source 1..20: mol_type = other RNA
tacccaggacacggagctcg

SEQ ID NO: 4711 - RNA, 20 nt, synthetic construct
  source 1..20: mol_type = other RNA
tacccgagcccgtcaccctg

SEQ ID NO: 4712 - RNA, 20 nt, synthetic construct
  source 1..20: mol_type = other RNA
tactccatctcagggtgacg

SEQ ID NO: 4713 - RNA, 20 nt, synthetic construct
  source 1..20: mol_type = other RNA
tagcccctcatgctgcacat

SEQ ID NO: 4714 - RNA, 20 nt, synthetic construct
  source 1..20: mol_type = other RNA
tatctctcatgggacactcc

SEQ ID NO: 4715 - RNA, 20 nt, synthetic construct
  source 1..20: mol_type = other RNA
tatggccctccccatcctgc

SEQ ID NO: 4716 - RNA, 20 nt, synthetic construct
  source 1..20: mol_type = other RNA
tcaccaccccatctctgacc

SEQ ID NO: 4717 - RNA, 20 nt, synthetic construct
  source 1..20: mol_type = other RNA
tcaccctgagatggagtaag

SEQ ID NO: 4718 - RNA, 20 nt, synthetic construct
  source 1..20: mol_type = other RNA
tcacgtgtgtctttgggggc

SEQ ID NO: 4719 - RNA, 20 nt, synthetic construct
  source 1..20: mol_type = other RNA
tcagaaaattcaggcacttt

SEQ ID NO: 4720 - RNA, 20 nt, synthetic construct
  source 1..20: mol_type = other RNA
tcagagatggggtggtgagt

SEQ ID NO: 4721 - RNA, 20 nt, synthetic construct
  source 1..20: mol_type = other RNA
tcagagcccccaaagacaca

SEQ ID NO: 4722 - RNA, 20 nt, synthetic construct
  source 1..20: mol_type = other RNA
tcaggcactttgtatctctc

SEQ ID NO: 4723 - RNA, 20 nt, synthetic construct
  source 1..20: mol_type = other RNA
tcagggtgacgggctcgggt

SEQ ID NO: 4724 - RNA, 20 nt, synthetic construct
  source 1..20: mol_type = other RNA
tcatggtcagagatggggtg

SEQ ID NO: 4725 - RNA, 20 nt, synthetic construct
  source 1..20: mol_type = other RNA
tccacgagctccgtgtcctg

SEQ ID NO: 4726 - RNA, 20 nt, synthetic construct
  source 1..20: mol_type = other RNA
tccatctcagggtgacgggc

SEQ ID NO: 4727 - RNA, 20 nt, synthetic construct
  source 1..20: mol_type = other RNA
tcccatccccctccttactc

SEQ ID NO: 4728 - RNA, 20 nt, synthetic construct
  source 1..20: mol_type = other RNA
tcccatgagagatacaaagt

SEQ ID NO: 4729 - RNA, 20 nt, synthetic construct
  source 1..20: mol_type = other RNA
tccccctccttactccatct

SEQ ID NO: 4730 - RNA, 20 nt, synthetic construct
  source 1..20: mol_type = other RNA
tcccctcagagcccccaaag

SEQ ID NO: 4731 - RNA, 20 nt, synthetic construct
  source 1..20: mol_type = other RNA
tccgtgtcctgggtatggcc

SEQ ID NO: 4732 - RNA, 20 nt, synthetic construct
  source 1..20: mol_type = other RNA
tcctgggtatggccctcccc

SEQ ID NO: 4733 - RNA, 20 nt, synthetic construct
  source 1..20: mol_type = other RNA
tccttactccatctcagggt

SEQ ID NO: 4734 - RNA, 20 nt, synthetic construct
  source 1..20: mol_type = other RNA
tcgggtagcccctcatgctg

SEQ ID NO: 4735 - RNA, 20 nt, synthetic construct
  source 1..20: mol_type = other RNA
tctcagggtgacgggctcgg

SEQ ID NO: 4736 - RNA, 20 nt, synthetic construct
  source 1..20: mol_type = other RNA
tctcatgggacactccagca

SEQ ID NO: 4737 - RNA, 20 nt, synthetic construct
  source 1..20: mol_type = other RNA
tctccacgagctccgtgtcc

SEQ ID NO: 4738 - RNA, 20 nt, synthetic construct
  source 1..20: mol_type = other RNA
tctctcatgggacactccag

SEQ ID NO: 4739 - RNA, 20 nt, synthetic construct
  source 1..20: mol_type = other RNA
tctgactcttcccctcagag

SEQ ID NO: 4740 - RNA, 20 nt, synthetic construct
  source 1..20: mol_type = other RNA
tcttcccctcagagccccca

SEQ ID NO: 4741 - RNA, 20 nt, synthetic construct
  source 1..20: mol_type = other RNA
tctttgggggctctgagggg

SEQ ID NO: 4742 - RNA, 20 nt, synthetic construct
  source 1..20: mol_type = other RNA
tgaattttctgactcttccc

SEQ ID NO: 4743 - RNA, 20 nt, synthetic construct
  source 1..20: mol_type = other RNA
tgacctcccatccccctcct

SEQ ID NO: 4744 - RNA, 20 nt, synthetic construct
  source 1..20: mol_type = other RNA
tgacctggcagcaggatggg

SEQ ID NO: 4745 - RNA, 20 nt, synthetic construct
  source 1..20: mol_type = other RNA
tgacgggctcgggtagcccc

SEQ ID NO: 4746 - RNA, 20 nt, synthetic construct
  source 1..20: mol_type = other RNA
tgactcaccaccccatctct

SEQ ID NO: 4747 - RNA, 20 nt, synthetic construct
  source 1..20: mol_type = other RNA
tgactcttcccctcagagcc

SEQ ID NO: 4748 - RNA, 20 nt, synthetic construct
  source 1..20: mol_type = other RNA
tgagaagagacatgacctcc

SEQ ID NO: 4749 - RNA, 20 nt, synthetic construct
  source 1..20: mol_type = other RNA
tgagagatacaaagtgcctg

SEQ ID NO: 4750 - RNA, 20 nt, synthetic construct
  source 1..20: mol_type = other RNA
tgagatggagtaaggagggg

SEQ ID NO: 4751 - RNA, 20 nt, synthetic construct
  source 1..20: mol_type = other RNA
tgaggggctacccgagcccg

SEQ ID NO: 4752 - RNA, 20 nt, synthetic construct
  source 1..20: mol_type = other RNA
tgagtcacgtgtgtctttgg

SEQ ID NO: 4753 - RNA, 20 nt, synthetic construct
  source 1..20: mol_type = other RNA
tgcagcatgaggggctaccc

SEQ ID NO: 4754 - RNA, 20 nt, synthetic construct
  source 1..20: mol_type = other RNA
tgccatgtgcagcatgaggg

SEQ ID NO: 4755 - RNA, 20 nt, synthetic construct
  source 1..20: mol_type = other RNA
tgctgctggagtgtcccatg

SEQ ID NO: 4756 - RNA, 20 nt, synthetic construct
  source 1..20: mol_type = other RNA
tgctggagtgtcccatgaga

SEQ ID NO: 4757 - RNA, 20 nt, synthetic construct
  source 1..20: mol_type = other RNA
tggagtaaggagggggatgg

SEQ ID NO: 4758 - RNA, 20 nt, synthetic construct
  source 1..20: mol_type = other RNA
tggagtgtcccatgagagat

SEQ ID NO: 4759 - RNA, 20 nt, synthetic construct
  source 1..20: mol_type = other RNA
tggcagcaggatggggaggg

SEQ ID NO: 4760 - RNA, 20 nt, synthetic construct
  source 1..20: mol_type = other RNA
tggccctccccatcctgctg

SEQ ID NO: 4761 - RNA, 20 nt, synthetic construct
  source 1..20: mol_type = other RNA
tggggagggccatacccagg

SEQ ID NO: 4762 - RNA, 20 nt, synthetic construct
  source 1..20: mol_type = other RNA
tgggggctctgaggggaaga

SEQ ID NO: 4763 - RNA, 20 nt, synthetic construct
  source 1..20: mol_type = other RNA
tggggtggtgagtcacgtgt

SEQ ID NO: 4764 - RNA, 20 nt, synthetic construct
  source 1..20: mol_type = other RNA
tgggtatggccctccccatc

SEQ ID NO: 4765 - RNA, 20 nt, synthetic construct
  source 1..20: mol_type = other RNA
tgggtgctgctggagtgtcc

SEQ ID NO: 4766 - RNA, 20 nt, synthetic construct
  source 1..20: mol_type = other RNA
tggtcagagatggggtggtg

SEQ ID NO: 4767 - RNA, 20 nt, synthetic construct
  source 1..20: mol_type = other RNA
tggtgagtcacgtgtgtctt

SEQ ID NO: 4768 - RNA, 20 nt, synthetic construct
  source 1..20: mol_type = other RNA
tgtatctctcatgggacact

SEQ ID NO: 4769 - RNA, 20 nt, synthetic construct
  source 1..20: mol_type = other RNA
tgtcccatgagagatacaaa

SEQ ID NO: 4770 - RNA, 20 nt, synthetic construct
  source 1..20: mol_type = other RNA
tgtcctgggtatggccctcc

SEQ ID NO: 4771 - RNA, 20 nt, synthetic construct
  source 1..20: mol_type = other RNA
tgtctttgggggctctgagg

SEQ ID NO: 4772 - RNA, 20 nt, synthetic construct
  source 1..20: mol_type = other RNA
tgtgcagcatgaggggctac

SEQ ID NO: 4773 - RNA, 20 nt, synthetic construct
  source 1..20: mol_type = other RNA
tgtgtctttgggggctctga

SEQ ID NO: 4774 - RNA, 20 nt, synthetic construct
  source 1..20: mol_type = other RNA
ttactccatctcagggtgac

SEQ ID NO: 4775 - RNA, 20 nt, synthetic construct
  source 1..20: mol_type = other RNA
ttcaggcactttgtatctct

SEQ ID NO: 4776 - RNA, 20 nt, synthetic construct
  source 1..20: mol_type = other RNA
ttcccctcagagcccccaaa

SEQ ID NO: 4777 - RNA, 20 nt, synthetic construct
  source 1..20: mol_type = other RNA
ttctgactcttcccctcaga

SEQ ID NO: 4778 - RNA, 20 nt, synthetic construct
  source 1..20: mol_type = other RNA
ttgggggctctgaggggaag

SEQ ID NO: 4779 - RNA, 20 nt, synthetic construct
  source 1..20: mol_type = other RNA
ttgtatctctcatgggacac

SEQ ID NO: 4780 - RNA, 20 nt, synthetic construct
  source 1..20: mol_type = other RNA
tttctgactcttcccctcag

SEQ ID NO: 4781 - RNA, 20 nt, synthetic construct
  source 1..20: mol_type = other RNA
tttgggggctctgaggggaa

SEQ ID NO: 4782 - RNA, 20 nt, synthetic construct
  source 1..20: mol_type = other RNA
tttgtatctctcatgggaca

SEQ ID NO: 4783 - RNA, 20 nt, synthetic construct
  source 1..20: mol_type = other RNA
ttttctgactcttcccctca

SEQ ID NO: 4784 - RNA, 21 nt, synthetic construct
  source 1..21: mol_type = other RNA
aaaattcaggcactttgtatc

SEQ ID NO: 4785 - RNA, 21 nt, synthetic construct
  source 1..21: mol_type = other RNA
aaagacacacgtgactcacca

SEQ ID NO: 4786 - RNA, 21 nt, synthetic construct
  source 1..21: mol_type = other RNA
aaattcaggcactttgtatct

SEQ ID NO: 4787 - RNA, 21 nt, synthetic construct
  source 1..21: mol_type = other RNA
aagacacacgtgactcaccac

SEQ ID NO: 4788 - RNA, 21 nt, synthetic construct
  source 1..21: mol_type = other RNA
aagagacatgacctcccatcc

SEQ ID NO: 4789 - RNA, 21 nt, synthetic construct
  source 1..21: mol_type = other RNA
aagagtcagaaaattcaggca

SEQ ID NO: 4790 - RNA, 21 nt, synthetic construct
  source 1..21: mol_type = other RNA
aaggagggggatgggaggtca

SEQ ID NO: 4791 - RNA, 21 nt, synthetic construct
  source 1..21: mol_type = other RNA
aattcaggcactttgtatctc

SEQ ID NO: 4792 - RNA, 21 nt, synthetic construct
  source 1..21: mol_type = other RNA
aattttctgactcttcccctc

SEQ ID NO: 4793 - RNA, 21 nt, synthetic construct
  source 1..21: mol_type = other RNA
acaaagtgcctgaattttctg

SEQ ID NO: 4794 - RNA, 21 nt, synthetic construct
  source 1..21: mol_type = other RNA
acacacgtgactcaccacccc

SEQ ID NO: 4795 - RNA, 21 nt, synthetic construct
  source 1..21: mol_type = other RNA
acacgtgactcaccaccccat

SEQ ID NO: 4796 - RNA, 21 nt, synthetic construct
  source 1..21: mol_type = other RNA
acacgtgccatgtgcagcatg

SEQ ID NO: 4797 - RNA, 21 nt, synthetic construct
  source 1..21: mol_type = other RNA
acactgacctggcagcaggat

SEQ ID NO: 4798 - RNA, 21 nt, synthetic construct
  source 1..21: mol_type = other RNA
acatgacctcccatccccctc

SEQ ID NO: 4799 - RNA, 21 nt, synthetic construct
  source 1..21: mol_type = other RNA
acccgagcccgtcaccctgag

SEQ ID NO: 4800 - RNA, 21 nt, synthetic construct
  source 1..21: mol_type = other RNA
accctgagatggagtaaggag

SEQ ID NO: 4801 - RNA, 21 nt, synthetic construct
  source 1..21: mol_type = other RNA
acctcccatccccctccttac

SEQ ID NO: 4802 - RNA, 21 nt, synthetic construct
  source 1..21: mol_type = other RNA
acctggcagcaggatggggag

SEQ ID NO: 4803 - RNA, 21 nt, synthetic construct
  source 1..21: mol_type = other RNA
acgagctccgtgtcctgggta

SEQ ID NO: 4804 - RNA, 21 nt, synthetic construct
  source 1..21: mol_type = other RNA
acgggctcgggtagcccctca

SEQ ID NO: 4805 - RNA, 21 nt, synthetic construct
  source 1..21: mol_type = other RNA
acgtgactcaccaccccatct

SEQ ID NO: 4806 - RNA, 21 nt, synthetic construct
  source 1..21: mol_type = other RNA
acgtgccatgtgcagcatgag

SEQ ID NO: 4807 - RNA, 21 nt, synthetic construct
  source 1..21: mol_type = other RNA
acgtgtgtctttgggggctct

SEQ ID NO: 4808 - RNA, 21 nt, synthetic construct
  source 1..21: mol_type = other RNA
actcaccaccccatctctgac

SEQ ID NO: 4809 - RNA, 21 nt, synthetic construct
  source 1..21: mol_type = other RNA
actccatctcagggtgacggg

SEQ ID NO: 4810 - RNA, 21 nt, synthetic construct
  source 1..21: mol_type = other RNA
actcttcccctcagagccccc

SEQ ID NO: 4811 - RNA, 21 nt, synthetic construct
  source 1..21: mol_type = other RNA
actgacctggcagcaggatgg

SEQ ID NO: 4812 - RNA, 21 nt, synthetic construct
  source 1..21: mol_type = other RNA
actttgtatctctcatgggac

SEQ ID NO: 4813 - RNA, 21 nt, synthetic construct
  source 1..21: mol_type = other RNA
agaaaattcaggcactttgta

SEQ ID NO: 4814 - RNA, 21 nt, synthetic construct
  source 1..21: mol_type = other RNA
agaagagacatgacctcccat

SEQ ID NO: 4815 - RNA, 21 nt, synthetic construct
  source 1..21: mol_type = other RNA
agacacacgtgactcaccacc

SEQ ID NO: 4816 - RNA, 21 nt, synthetic construct
  source 1..21: mol_type = other RNA
agacatgacctcccatccccc

SEQ ID NO: 4817 - RNA, 21 nt, synthetic construct
  source 1..21: mol_type = other RNA
agagacatgacctcccatccc

SEQ ID NO: 4818 - RNA, 21 nt, synthetic construct
  source 1..21: mol_type = other RNA
agagatacaaagtgcctgaat

SEQ ID NO: 4819 - RNA, 21 nt, synthetic construct
  source 1..21: mol_type = other RNA
agagatggggtggtgagtcac

SEQ ID NO: 4820 - RNA, 21 nt, synthetic construct
  source 1..21: mol_type = other RNA
agagcccccaaagacacacgt

SEQ ID NO: 4821 - RNA, 21 nt, synthetic construct
  source 1..21: mol_type = other RNA
agagtcagaaaattcaggcac

SEQ ID NO: 4822 - RNA, 21 nt, synthetic construct
  source 1..21: mol_type = other RNA
agatacaaagtgcctgaattt

SEQ ID NO: 4823 - RNA, 21 nt, synthetic construct
  source 1..21: mol_type = other RNA
agatggagtaaggagggggat

SEQ ID NO: 4824 - RNA, 21 nt, synthetic construct
  source 1..21: mol_type = other RNA
agatggggtggtgagtcacgt

SEQ ID NO: 4825 - RNA, 21 nt, synthetic construct
  source 1..21: mol_type = other RNA
agcaggatggggagggccata

SEQ ID NO: 4826 - RNA, 21 nt, synthetic construct
  source 1..21: mol_type = other RNA
agcatgaggggctacccgagc

SEQ ID NO: 4827 - RNA, 21 nt, synthetic construct
  source 1..21: mol_type = other RNA
agcccccaaagacacacgtga

SEQ ID NO: 4828 - RNA, 21 nt, synthetic construct
  source 1..21: mol_type = other RNA
agcccgtcaccctgagatgga

SEQ ID NO: 4829 - RNA, 21 nt, synthetic construct
  source 1..21: mol_type = other RNA
agctccgtgtcctgggtatgg

SEQ ID NO: 4830 - RNA, 21 nt, synthetic construct
  source 1..21: mol_type = other RNA
aggagggggatgggaggtcat

SEQ ID NO: 4831 - RNA, 21 nt, synthetic construct
  source 1..21: mol_type = other RNA
aggatggggagggccataccc

SEQ ID NO: 4832 - RNA, 21 nt, synthetic construct
  source 1..21: mol_type = other RNA
aggcactttgtatctctcatg

SEQ ID NO: 4833 - RNA, 21 nt, synthetic construct
  source 1..21: mol_type = other RNA
agggccatacccaggacacgg

SEQ ID NO: 4834 - RNA, 21 nt, synthetic construct
  source 1..21: mol_type = other RNA
aggggctacccgagcccgtca

SEQ ID NO: 4835 - RNA, 21 nt, synthetic construct
  source 1..21: mol_type = other RNA
agggggatgggaggtcatgtc

SEQ ID NO: 4836 - RNA, 21 nt, synthetic construct
  source 1..21: mol_type = other RNA
agggtgacgggctcgggtagc

SEQ ID NO: 4837 - RNA, 21 nt, synthetic construct
  source 1..21: mol_type = other RNA
agtaaggagggggatgggagg

SEQ ID NO: 4838 - RNA, 21 nt, synthetic construct
  source 1..21: mol_type = other RNA
agtcacgtgtgtctttggggg

SEQ ID NO: 4839 - RNA, 21 nt, synthetic construct
  source 1..21: mol_type = other RNA
agtcagaaaattcaggcactt

SEQ ID NO: 4840 - RNA, 21 nt, synthetic construct
  source 1..21: mol_type = other RNA
agtgtcccatgagagatacaa

SEQ ID NO: 4841 - RNA, 21 nt, synthetic construct
  source 1..21: mol_type = other RNA
atacaaagtgcctgaattttc

SEQ ID NO: 4842 - RNA, 21 nt, synthetic construct
  source 1..21: mol_type = other RNA
atacccaggacacggagctcg

SEQ ID NO: 4843 - RNA, 21 nt, synthetic construct
  source 1..21: mol_type = other RNA
atccccctccttactccatct

SEQ ID NO: 4844 - RNA, 21 nt, synthetic construct
  source 1..21: mol_type = other RNA
atctcagggtgacgggctcgg

SEQ ID NO: 4845 - RNA, 21 nt, synthetic construct
  source 1..21: mol_type = other RNA
atctctcatgggacactccag

SEQ ID NO: 4846 - RNA, 21 nt, synthetic construct
  source 1..21: mol_type = other RNA
atgacctcccatccccctcct

SEQ ID NO: 4847 - RNA, 21 nt, synthetic construct
  source 1..21: mol_type = other RNA
atgagagatacaaagtgcctg

SEQ ID NO: 4848 - RNA, 21 nt, synthetic construct
  source 1..21: mol_type = other RNA
atgaggggctacccgagcccg

SEQ ID NO: 4849 - RNA, 21 nt, synthetic construct
  source 1..21: mol_type = other RNA
atggagtaaggagggggatgg

SEQ ID NO: 4850 - RNA, 21 nt, synthetic construct
  source 1..21: mol_type = other RNA
atggccctccccatcctgctg

SEQ ID NO: 4851 - RNA, 21 nt, synthetic construct
  source 1..21: mol_type = other RNA
atggggagggccatacccagg

SEQ ID NO: 4852 - RNA, 21 nt, synthetic construct
  source 1..21: mol_type = other RNA
atggggtggtgagtcacgtgt

SEQ ID NO: 4853 - RNA, 21 nt, synthetic construct
  source 1..21: mol_type = other RNA
atgggtgctgctggagtgtcc

SEQ ID NO: 4854 - RNA, 21 nt, synthetic construct
  source 1..21: mol_type = other RNA
atggtcagagatggggtggtg

SEQ ID NO: 4855 - RNA, 21 nt, synthetic construct
  source 1..21: mol_type = other RNA
atgtgcagcatgaggggctac

SEQ ID NO: 4856 - RNA, 21 nt, synthetic construct
  source 1..21: mol_type = other RNA
attcaggcactttgtatctct

SEQ ID NO: 4857 - RNA, 21 nt, synthetic construct
  source 1..21: mol_type = other RNA
attttctgactcttcccctca

SEQ ID NO: 4858 - RNA, 21 nt, synthetic construct
  source 1..21: mol_type = other RNA
caaagacacacgtgactcacc

SEQ ID NO: 4859 - RNA, 21 nt, synthetic construct
  source 1..21: mol_type = other RNA
cacacgtgactcaccacccca

SEQ ID NO: 4860 - RNA, 21 nt, synthetic construct
  source 1..21: mol_type = other RNA
caccctgagatggagtaagga

SEQ ID NO: 4861 - RNA, 21 nt, synthetic construct
  source 1..21: mol_type = other RNA
cacgagctccgtgtcctgggt

SEQ ID NO: 4862 - RNA, 21 nt, synthetic construct
  source 1..21: mol_type = other RNA
cacgtgactcaccaccccatc

SEQ ID NO: 4863 - RNA, 21 nt, synthetic construct
  source 1..21: mol_type = other RNA
cacgtgccatgtgcagcatga

SEQ ID NO: 4864 - RNA, 21 nt, synthetic construct
  source 1..21: mol_type = other RNA
cacgtgtgtctttgggggctc

SEQ ID NO: 4865 - RNA, 21 nt, synthetic construct
  source 1..21: mol_type = other RNA
cactgacctggcagcaggatg

SEQ ID NO: 4866 - RNA, 21 nt, synthetic construct
  source 1..21: mol_type = other RNA
cactttgtatctctcatggga

SEQ ID NO: 4867 - RNA, 21 nt, synthetic construct
  source 1..21: mol_type = other RNA
cagaaaattcaggcactttgt

SEQ ID NO: 4868 - RNA, 21 nt, synthetic construct
  source 1..21: mol_type = other RNA
cagagatggggtggtgagtca

SEQ ID NO: 4869 - RNA, 21 nt, synthetic construct
  source 1..21: mol_type = other RNA
cagagcccccaaagacacacg

SEQ ID NO: 4870 - RNA, 21 nt, synthetic construct
  source 1..21: mol_type = other RNA
cagcaggatggggagggccat

SEQ ID NO: 4871 - RNA, 21 nt, synthetic construct
  source 1..21: mol_type = other RNA
cagcatgaggggctacccgag

SEQ ID NO: 4872 - RNA, 21 nt, synthetic construct
  source 1..21: mol_type = other RNA
caggatggggagggccatacc

SEQ ID NO: 4873 - RNA, 21 nt, synthetic construct
  source 1..21: mol_type = other RNA
caggcactttgtatctctcat

SEQ ID NO: 4874 - RNA, 21 nt, synthetic construct
  source 1..21: mol_type = other RNA
cagggtgacgggctcgggtag

SEQ ID NO: 4875 - RNA, 21 nt, synthetic construct
  source 1..21: mol_type = other RNA
catacccaggacacggagctc

SEQ ID NO: 4876 - RNA, 21 nt, synthetic construct
  source 1..21: mol_type = other RNA
catccccctccttactccatc

SEQ ID NO: 4877 - RNA, 21 nt, synthetic construct
  source 1..21: mol_type = other RNA
catctcagggtgacgggctcg

SEQ ID NO: 4878 - RNA, 21 nt, synthetic construct
  source 1..21: mol_type = other RNA
catgacctcccatccccctcc

SEQ ID NO: 4879 - RNA, 21 nt, synthetic construct
  source 1..21: mol_type = other RNA
catgagagatacaaagtgcct

SEQ ID NO: 4880 - RNA, 21 nt, synthetic construct
  source 1..21: mol_type = other RNA
catgaggggctacccgagccc

SEQ ID NO: 4881 - RNA, 21 nt, synthetic construct
  source 1..21: mol_type = other RNA
catgggtgctgctggagtgtc

SEQ ID NO: 4882 - RNA, 21 nt, synthetic construct
  source 1..21: mol_type = other RNA
catggtcagagatggggtggt

SEQ ID NO: 4883 - RNA, 21 nt, synthetic construct
  source 1..21: mol_type = other RNA
catgtgcagcatgaggggcta

SEQ ID NO: 4884 - RNA, 21 nt, synthetic construct
  source 1..21: mol_type = other RNA
ccaaagacacacgtgactcac

SEQ ID NO: 4885 - RNA, 21 nt, synthetic construct
  source 1..21: mol_type = other RNA
ccacgagctccgtgtcctggg

SEQ ID NO: 4886 - RNA, 21 nt, synthetic construct
  source 1..21: mol_type = other RNA
ccatacccaggacacggagct

SEQ ID NO: 4887 - RNA, 21 nt, synthetic construct
  source 1..21: mol_type = other RNA
ccatccccctccttactccat

SEQ ID NO: 4888 - RNA, 21 nt, synthetic construct
  source 1..21: mol_type = other RNA
ccatctcagggtgacgggctc

SEQ ID NO: 4889 - RNA, 21 nt, synthetic construct
  source 1..21: mol_type = other RNA
ccatgagagatacaaagtgcc

SEQ ID NO: 4890 - RNA, 21 nt, synthetic construct
  source 1..21: mol_type = other RNA
ccatgtgcagcatgaggggct

SEQ ID NO: 4891 - RNA, 21 nt, synthetic construct
  source 1..21: mol_type = other RNA
cccaaagacacacgtgactca

SEQ ID NO: 4892 - RNA, 21 nt, synthetic construct
  source 1..21: mol_type = other RNA
cccatccccctccttactcca

SEQ ID NO: 4893 - RNA, 21 nt, synthetic construct
  source 1..21: mol_type = other RNA
cccatgagagatacaaagtgc

SEQ ID NO: 4894 - RNA, 21 nt, synthetic construct
  source 1..21: mol_type = other RNA
ccccaaagacacacgtgactc

SEQ ID NO: 4895 - RNA, 21 nt, synthetic construct
  source 1..21: mol_type = other RNA
cccccaaagacacacgtgact

SEQ ID NO: 4896 - RNA, 21 nt, synthetic construct
  source 1..21: mol_type = other RNA
ccccctccttactccatctca

SEQ ID NO: 4897 - RNA, 21 nt, synthetic construct
  source 1..21: mol_type = other RNA
cccctcagagcccccaaagac

SEQ ID NO: 4898 - RNA, 21 nt, synthetic construct
  source 1..21: mol_type = other RNA
cccctccttactccatctcag

SEQ ID NO: 4899 - RNA, 21 nt, synthetic construct
  source 1..21: mol_type = other RNA
cccgagcccgtcaccctgaga

SEQ ID NO: 4900 - RNA, 21 nt, synthetic construct
  source 1..21: mol_type = other RNA
cccgtcaccctgagatggagt

SEQ ID NO: 4901 - RNA, 21 nt, synthetic construct
  source 1..21: mol_type = other RNA
ccctcagagcccccaaagaca

SEQ ID NO: 4902 - RNA, 21 nt, synthetic construct
  source 1..21: mol_type = other RNA
ccctccccatcctgctgccag

SEQ ID NO: 4903 - RNA, 21 nt, synthetic construct
  source 1..21: mol_type = other RNA
ccctccttactccatctcagg

SEQ ID NO: 4904 - RNA, 21 nt, synthetic construct
  source 1..21: mol_type = other RNA
ccctgagaagagacatgacct

SEQ ID NO: 4905 - RNA, 21 nt, synthetic construct
  source 1..21: mol_type = other RNA
ccctgagatggagtaaggagg

SEQ ID NO: 4906 - RNA, 21 nt, synthetic construct
  source 1..21: mol_type = other RNA
ccgagcccgtcaccctgagat

SEQ ID NO: 4907 - RNA, 21 nt, synthetic construct
  source 1..21: mol_type = other RNA
ccgtcaccctgagatggagta

SEQ ID NO: 4908 - RNA, 21 nt, synthetic construct
  source 1..21: mol_type = other RNA
ccgtgtcctgggtatggccct

SEQ ID NO: 4909 - RNA, 21 nt, synthetic construct
  source 1..21: mol_type = other RNA
cctcagagcccccaaagacac

SEQ ID NO: 4910 - RNA, 21 nt, synthetic construct
  source 1..21: mol_type = other RNA
cctcatggtcagagatggggt

SEQ ID NO: 4911 - RNA, 21 nt, synthetic construct
  source 1..21: mol_type = other RNA
cctcccatccccctccttact

SEQ ID NO: 4912 - RNA, 21 nt, synthetic construct
  source 1..21: mol_type = other RNA
cctccttactccatctcaggg

SEQ ID NO: 4913 - RNA, 21 nt, synthetic construct
  source 1..21: mol_type = other RNA
cctgaattttctgactcttcc

SEQ ID NO: 4914 - RNA, 21 nt, synthetic construct
  source 1..21: mol_type = other RNA
cctgagaagagacatgacctc

SEQ ID NO: 4915 - RNA, 21 nt, synthetic construct
  source 1..21: mol_type = other RNA
cctgagatggagtaaggaggg

SEQ ID NO: 4916 - RNA, 21 nt, synthetic construct
  source 1..21: mol_type = other RNA
cctggcagcaggatggggagg

SEQ ID NO: 4917 - RNA, 21 nt, synthetic construct
  source 1..21: mol_type = other RNA
cctgggtatggccctccccat

SEQ ID NO: 4918 - RNA, 21 nt, synthetic construct
  source 1..21: mol_type = other RNA
ccttactccatctcagggtga

SEQ ID NO: 4919 - RNA, 21 nt, synthetic construct
  source 1..21: mol_type = other RNA
cgagcccgtcaccctgagatg

SEQ ID NO: 4920 - RNA, 21 nt, synthetic construct
  source 1..21: mol_type = other RNA
cgagctccgtgtcctgggtat

SEQ ID NO: 4921 - RNA, 21 nt, synthetic construct
  source 1..21: mol_type = other RNA
cgggctcgggtagcccctcat

SEQ ID NO: 4922 - RNA, 21 nt, synthetic construct
  source 1..21: mol_type = other RNA
cgggtagcccctcatgctgca

SEQ ID NO: 4923 - RNA, 21 nt, synthetic construct
  source 1..21: mol_type = other RNA
cgtcaccctgagatggagtaa

SEQ ID NO: 4924 - RNA, 21 nt, synthetic construct
  source 1..21: mol_type = other RNA
cgtgactcaccaccccatctc

SEQ ID NO: 4925 - RNA, 21 nt, synthetic construct
  source 1..21: mol_type = other RNA
cgtgccatgtgcagcatgagg

SEQ ID NO: 4926 - RNA, 21 nt, synthetic construct
  source 1..21: mol_type = other RNA
cgtgtcctgggtatggccctc

SEQ ID NO: 4927 - RNA, 21 nt, synthetic construct
  source 1..21: mol_type = other RNA
cgtgtgtctttgggggctctg

SEQ ID NO: 4928 - RNA, 21 nt, synthetic construct
  source 1..21: mol_type = other RNA
ctacccgagcccgtcaccctg

SEQ ID NO: 4929 - RNA, 21 nt, synthetic construct
  source 1..21: mol_type = other RNA
ctcaccaccccatctctgacc

SEQ ID NO: 4930 - RNA, 21 nt, synthetic construct
  source 1..21: mol_type = other RNA
ctcagagcccccaaagacaca

SEQ ID NO: 4931 - RNA, 21 nt, synthetic construct
  source 1..21: mol_type = other RNA
ctcagggtgacgggctcgggt

SEQ ID NO: 4932 - RNA, 21 nt, synthetic construct
  source 1..21: mol_type = other RNA
ctcatggtcagagatggggtg

SEQ ID NO: 4933 - RNA, 21 nt, synthetic construct
  source 1..21: mol_type = other RNA
ctccacgagctccgtgtcctg

SEQ ID NO: 4934 - RNA, 21 nt, synthetic construct
  source 1..21: mol_type = other RNA
ctccatctcagggtgacgggc

SEQ ID NO: 4935 - RNA, 21 nt, synthetic construct
  source 1..21: mol_type = other RNA
ctcccatccccctccttactc

SEQ ID NO: 4936 - RNA, 21 nt, synthetic construct
  source 1..21: mol_type = other RNA
ctccgtgtcctgggtatggcc

SEQ ID NO: 4937 - RNA, 21 nt, synthetic construct
  source 1..21: mol_type = other RNA
ctccttactccatctcagggt

SEQ ID NO: 4938 - RNA, 21 nt, synthetic construct
  source 1..21: mol_type = other RNA
ctcgggtagcccctcatgctg

SEQ ID NO: 4939 - RNA, 21 nt, synthetic construct
  source 1..21: mol_type = other RNA
ctctcatgggacactccagca

SEQ ID NO: 4940 - RNA, 21 nt, synthetic construct
  source 1..21: mol_type = other RNA
ctctgaggggaagagtcagaa

SEQ ID NO: 4941 - RNA, 21 nt, synthetic construct
  source 1..21: mol_type = other RNA
ctcttcccctcagagccccca

SEQ ID NO: 4942 - RNA, 21 nt, synthetic construct
  source 1..21: mol_type = other RNA
ctgaattttctgactcttccc

SEQ ID NO: 4943 - RNA, 21 nt, synthetic construct
  source 1..21: mol_type = other RNA
ctgacctggcagcaggatggg

SEQ ID NO: 4944 - RNA, 21 nt, synthetic construct
  source 1..21: mol_type = other RNA
ctgactcttcccctcagagcc

SEQ ID NO: 4945 - RNA, 21 nt, synthetic construct
  source 1..21: mol_type = other RNA
ctgagaagagacatgacctcc

SEQ ID NO: 4946 - RNA, 21 nt, synthetic construct
  source 1..21: mol_type = other RNA
ctgagatggagtaaggagggg

SEQ ID NO: 4947 - RNA, 21 nt, synthetic construct
  source 1..21: mol_type = other RNA
ctgctggagtgtcccatgaga

SEQ ID NO: 4948 - RNA, 21 nt, synthetic construct
  source 1..21: mol_type = other RNA
ctggagtgtcccatgagagat

SEQ ID NO: 4949 - RNA, 21 nt, synthetic construct
  source 1..21: mol_type = other RNA
ctggcagcaggatggggaggg

SEQ ID NO: 4950 - RNA, 21 nt, synthetic construct
  source 1..21: mol_type = other RNA
ctgggtatggccctccccatc

SEQ ID NO: 4951 - RNA, 21 nt, synthetic construct
  source 1..21: mol_type = other RNA
cttactccatctcagggtgac

SEQ ID NO: 4952 - RNA, 21 nt, synthetic construct
  source 1..21: mol_type = other RNA
cttcccctcagagcccccaaa

SEQ ID NO: 4953 - RNA, 21 nt, synthetic construct
  source 1..21: mol_type = other RNA
ctttgggggctctgaggggaa

SEQ ID NO: 4954 - RNA, 21 nt, synthetic construct
  source 1..21: mol_type = other RNA
ctttgtatctctcatgggaca

SEQ ID NO: 4955 - RNA, 21 nt, synthetic construct
  source 1..21: mol_type = other RNA
gaaaattcaggcactttgtat

SEQ ID NO: 4956 - RNA, 21 nt, synthetic construct
  source 1..21: mol_type = other RNA
gaagagacatgacctcccatc

SEQ ID NO: 4957 - RNA, 21 nt, synthetic construct
  source 1..21: mol_type = other RNA
gaagagtcagaaaattcaggc

SEQ ID NO: 4958 - RNA, 21 nt, synthetic construct
  source 1..21: mol_type = other RNA
gaattttctgactcttcccct

SEQ ID NO: 4959 - RNA, 21 nt, synthetic construct
  source 1..21: mol_type = other RNA
gacacacgtgactcaccaccc

SEQ ID NO: 4960 - RNA, 21 nt, synthetic construct
  source 1..21: mol_type = other RNA
gacatgacctcccatccccct

SEQ ID NO: 4961 - RNA, 21 nt, synthetic construct
  source 1..21: mol_type = other RNA
gacctcccatccccctcctta

SEQ ID NO: 4962 - RNA, 21 nt, synthetic construct
  source 1..21: mol_type = other RNA
gacctggcagcaggatgggga

SEQ ID NO: 4963 - RNA, 21 nt, synthetic construct
  source 1..21: mol_type = other RNA
gacgggctcgggtagcccctc

SEQ ID NO: 4964 - RNA, 21 nt, synthetic construct
  source 1..21: mol_type = other RNA
gactcaccaccccatctctga

SEQ ID NO: 4965 - RNA, 21 nt, synthetic construct
  source 1..21: mol_type = other RNA
gactcttcccctcagagcccc

SEQ ID NO: 4966 - RNA, 21 nt, synthetic construct
  source 1..21: mol_type = other RNA
gagaagagacatgacctccca

SEQ ID NO: 4967 - RNA, 21 nt, synthetic construct
  source 1..21: mol_type = other RNA
gagacatgacctcccatcccc

SEQ ID NO: 4968 - RNA, 21 nt, synthetic construct
  source 1..21: mol_type = other RNA
gagagatacaaagtgcctgaa

SEQ ID NO: 4969 - RNA, 21 nt, synthetic construct
  source 1..21: mol_type = other RNA
gagatacaaagtgcctgaatt

SEQ ID NO: 4970 - RNA, 21 nt, synthetic construct
  source 1..21: mol_type = other RNA
gagatggagtaaggaggggga

SEQ ID NO: 4971 - RNA, 21 nt, synthetic construct
  source 1..21: mol_type = other RNA
gagatggggtggtgagtcacg

SEQ ID NO: 4972 - RNA, 21 nt, synthetic construct
  source 1..21: mol_type = other RNA
gagcccccaaagacacacgtg

SEQ ID NO: 4973 - RNA, 21 nt, synthetic construct
  source 1..21: mol_type = other RNA
gagcccgtcaccctgagatgg

SEQ ID NO: 4974 - RNA, 21 nt, synthetic construct
  source 1..21: mol_type = other RNA
gagctccgtgtcctgggtatg

SEQ ID NO: 4975 - RNA, 21 nt, synthetic construct
  source 1..21: mol_type = other RNA
gagggccatacccaggacacg

SEQ ID NO: 4976 - RNA, 21 nt, synthetic construct
  source 1..21: mol_type = other RNA
gaggggctacccgagcccgtc

SEQ ID NO: 4977 - RNA, 21 nt, synthetic construct
  source 1..21: mol_type = other RNA
gagggggatgggaggtcatgt

SEQ ID NO: 4978 - RNA, 21 nt, synthetic construct
  source 1..21: mol_type = other RNA
gagtaaggagggggatgggag

SEQ ID NO: 4979 - RNA, 21 nt, synthetic construct
  source 1..21: mol_type = other RNA
gagtcacgtgtgtctttgggg

SEQ ID NO: 4980 - RNA, 21 nt, synthetic construct
  source 1..21: mol_type = other RNA
gagtcagaaaattcaggcact

SEQ ID NO: 4981 - RNA, 21 nt, synthetic construct
  source 1..21: mol_type = other RNA
gagtgtcccatgagagataca

SEQ ID NO: 4982 - RNA, 21 nt, synthetic construct
  source 1..21: mol_type = other RNA
gatacaaagtgcctgaatttt

SEQ ID NO: 4983 - RNA, 21 nt, synthetic construct
  source 1..21: mol_type = other RNA
gatggagtaaggagggggatg

SEQ ID NO: 4984 - RNA, 21 nt, synthetic construct
  source 1..21: mol_type = other RNA
gatggggagggccatacccag

SEQ ID NO: 4985 - RNA, 21 nt, synthetic construct
  source 1..21: mol_type = other RNA
gatggggtggtgagtcacgtg

SEQ ID NO: 4986 - RNA, 21 nt, synthetic construct
  source 1..21: mol_type = other RNA
gcactttgtatctctcatggg

SEQ ID NO: 4987 - RNA, 21 nt, synthetic construct
  source 1..21: mol_type = other RNA
gcagcaggatggggagggcca

SEQ ID NO: 4988 - RNA, 21 nt, synthetic construct
  source 1..21: mol_type = other RNA
gcagcatgaggggctacccga

SEQ ID NO: 4989 - RNA, 21 nt, synthetic construct
  source 1..21: mol_type = other RNA
gcaggatggggagggccatac

SEQ ID NO: 4990 - RNA, 21 nt, synthetic construct
  source 1..21: mol_type = other RNA
gcatgaggggctacccgagcc

SEQ ID NO: 4991 - RNA, 21 nt, synthetic construct
  source 1..21: mol_type = other RNA
gccatacccaggacacggagc

SEQ ID NO: 4992 - RNA, 21 nt, synthetic construct
  source 1..21: mol_type = other RNA
gccatgtgcagcatgaggggc

SEQ ID NO: 4993 - RNA, 21 nt, synthetic construct
  source 1..21: mol_type = other RNA
gcccccaaagacacacgtgac

SEQ ID NO: 4994 - RNA, 21 nt, synthetic construct
  source 1..21: mol_type = other RNA
gcccgtcaccctgagatggag

SEQ ID NO: 4995 - RNA, 21 nt, synthetic construct
  source 1..21: mol_type = other RNA
gccctccccatcctgctgcca

SEQ ID NO: 4996 - RNA, 21 nt, synthetic construct
  source 1..21: mol_type = other RNA
gcctcatggtcagagatgggg

SEQ ID NO: 4997 - RNA, 21 nt, synthetic construct
  source 1..21: mol_type = other RNA
gctacccgagcccgtcaccct

SEQ ID NO: 4998 - RNA, 21 nt, synthetic construct
  source 1..21: mol_type = other RNA
gctccgtgtcctgggtatggc

SEQ ID NO: 4999 - RNA, 21 nt, synthetic construct
  source 1..21: mol_type = other RNA
gctcgggtagcccctcatgct

SEQ ID NO: 5000 - RNA, 21 nt, synthetic construct
  source 1..21: mol_type = other RNA
gctctgaggggaagagtcaga

SEQ ID NO: 5001 - RNA, 21 nt, synthetic construct
  source 1..21: mol_type = other RNA
gctgctggagtgtcccatgag

SEQ ID NO: 5002 - RNA, 21 nt, synthetic construct
  source 1..21: mol_type = other RNA
gctggagtgtcccatgagaga

SEQ ID NO: 5003 - RNA, 21 nt, synthetic construct
  source 1..21: mol_type = other RNA
ggaagagtcagaaaattcagg

SEQ ID NO: 5004 - RNA, 21 nt, synthetic construct
  source 1..21: mol_type = other RNA
ggagggccatacccaggacac

SEQ ID NO: 5005 - RNA, 21 nt, synthetic construct
  source 1..21: mol_type = other RNA
ggagggggatgggaggtcatg

SEQ ID NO: 5006 - RNA, 21 nt, synthetic construct
  source 1..21: mol_type = other RNA
ggagtaaggagggggatggga

SEQ ID NO: 5007 - RNA, 21 nt, synthetic construct
  source 1..21: mol_type = other RNA
ggagtgtcccatgagagatac

SEQ ID NO: 5008 - RNA, 21 nt, synthetic construct
  source 1..21: mol_type = other RNA
ggatggggagggccataccca

SEQ ID NO: 5009 - RNA, 21 nt, synthetic construct
  source 1..21: mol_type = other RNA
ggcactttgtatctctcatgg

SEQ ID NO: 5010 - RNA, 21 nt, synthetic construct
  source 1..21: mol_type = other RNA
ggcagcaggatggggagggcc

SEQ ID NO: 5011 - RNA, 21 nt, synthetic construct
  source 1..21: mol_type = other RNA
ggccatacccaggacacggag

SEQ ID NO: 5012 - RNA, 21 nt, synthetic construct
  source 1..21: mol_type = other RNA
ggccctccccatcctgctgcc

SEQ ID NO: 5013 - RNA, 21 nt, synthetic construct
  source 1..21: mol_type = other RNA
ggcctcatggtcagagatggg

SEQ ID NO: 5014 - RNA, 21 nt, synthetic construct
  source 1..21: mol_type = other RNA
ggctacccgagcccgtcaccc

SEQ ID NO: 5015 - RNA, 21 nt, synthetic construct
  source 1..21: mol_type = other RNA
ggctcgggtagcccctcatgc

SEQ ID NO: 5016 - RNA, 21 nt, synthetic construct
  source 1..21: mol_type = other RNA
ggctctgaggggaagagtcag

SEQ ID NO: 5017 - RNA, 21 nt, synthetic construct
  source 1..21: mol_type = other RNA
gggagggccatacccaggaca

SEQ ID NO: 5018 - RNA, 21 nt, synthetic construct
  source 1..21: mol_type = other RNA
gggatgggaggtcatgtctct

SEQ ID NO: 5019 - RNA, 21 nt, synthetic construct
  source 1..21: mol_type = other RNA
gggccatacccaggacacgga

SEQ ID NO: 5020 - RNA, 21 nt, synthetic construct
  source 1..21: mol_type = other RNA
gggctacccgagcccgtcacc

SEQ ID NO: 5021 - RNA, 21 nt, synthetic construct
  source 1..21: mol_type = other RNA
gggctcgggtagcccctcatg

SEQ ID NO: 5022 - RNA, 21 nt, synthetic construct
  source 1..21: mol_type = other RNA
gggctctgaggggaagagtca

SEQ ID NO: 5023 - RNA, 21 nt, synthetic construct
  source 1..21: mol_type = other RNA
ggggagggccatacccaggac

SEQ ID NO: 5024 - RNA, 21 nt, synthetic construct
  source 1..21: mol_type = other RNA
ggggatgggaggtcatgtctc

SEQ ID NO: 5025 - RNA, 21 nt, synthetic construct
  source 1..21: mol_type = other RNA
ggggctacccgagcccgtcac

SEQ ID NO: 5026 - RNA, 21 nt, synthetic construct
  source 1..21: mol_type = other RNA
ggggctctgaggggaagagtc

SEQ ID NO: 5027 - RNA, 21 nt, synthetic construct
  source 1..21: mol_type = other RNA
gggggatgggaggtcatgtct

SEQ ID NO: 5028 - RNA, 21 nt, synthetic construct
  source 1..21: mol_type = other RNA
gggggctctgaggggaagagt

SEQ ID NO: 5029 - RNA, 21 nt, synthetic construct
  source 1..21: mol_type = other RNA
ggggtggtgagtcacgtgtgt

SEQ ID NO: 5030 - RNA, 21 nt, synthetic construct
  source 1..21: mol_type = other RNA
gggtagcccctcatgctgcac

SEQ ID NO: 5031 - RNA, 21 nt, synthetic construct
  source 1..21: mol_type = other RNA
gggtatggccctccccatcct

SEQ ID NO: 5032 - RNA, 21 nt, synthetic construct
  source 1..21: mol_type = other RNA
gggtgacgggctcgggtagcc

SEQ ID NO: 5033 - RNA, 21 nt, synthetic construct
  source 1..21: mol_type = other RNA
gggtgctgctggagtgtccca

SEQ ID NO: 5034 - RNA, 21 nt, synthetic construct
  source 1..21: mol_type = other RNA
gggtggtgagtcacgtgtgtc

SEQ ID NO: 5035 - RNA, 21 nt, synthetic construct
  source 1..21: mol_type = other RNA
ggtagcccctcatgctgcaca

SEQ ID NO: 5036 - RNA, 21 nt, synthetic construct
  source 1..21: mol_type = other RNA
ggtatggccctccccatcctg

SEQ ID NO: 5037 - RNA, 21 nt, synthetic construct
  source 1..21: mol_type = other RNA
ggtcagagatggggtggtgag

SEQ ID NO: 5038 - RNA, 21 nt, synthetic construct
  source 1..21: mol_type = other RNA
ggtctccacgagctccgtgtc

SEQ ID NO: 5039 - RNA, 21 nt, synthetic construct
  source 1..21: mol_type = other RNA
ggtgacgggctcgggtagccc

SEQ ID NO: 5040 - RNA, 21 nt, synthetic construct
  source 1..21: mol_type = other RNA
ggtgagtcacgtgtgtctttg

SEQ ID NO: 5041 - RNA, 21 nt, synthetic construct
  source 1..21: mol_type = other RNA
ggtgctgctggagtgtcccat

SEQ ID NO: 5042 - RNA, 21 nt, synthetic construct
  source 1..21: mol_type = other RNA
ggtggtgagtcacgtgtgtct

SEQ ID NO: 5043 - RNA, 21 nt, synthetic construct
  source 1..21: mol_type = other RNA
gtaaggagggggatgggaggt

SEQ ID NO: 5044 - RNA, 21 nt, synthetic construct
  source 1..21: mol_type = other RNA
gtagcccctcatgctgcacat

SEQ ID NO: 5045 - RNA, 21 nt, synthetic construct
  source 1..21: mol_type = other RNA
gtatctctcatgggacactcc

SEQ ID NO: 5046 - RNA, 21 nt, synthetic construct
  source 1..21: mol_type = other RNA
gtatggccctccccatcctgc

SEQ ID NO: 5047 - RNA, 21 nt, synthetic construct
  source 1..21: mol_type = other RNA
gtcaccctgagatggagtaag

SEQ ID NO: 5048 - RNA, 21 nt, synthetic construct
  source 1..21: mol_type = other RNA
gtcacgtgtgtctttgggggc

SEQ ID NO: 5049 - RNA, 21 nt, synthetic construct
  source 1..21: mol_type = other RNA
gtcagaaaattcaggcacttt

SEQ ID NO: 5050 - RNA, 21 nt, synthetic construct
  source 1..21: mol_type = other RNA
gtcagagatggggtggtgagt

SEQ ID NO: 5051 - RNA, 21 nt, synthetic construct
  source 1..21: mol_type = other RNA
gtcccatgagagatacaaagt

SEQ ID NO: 5052 - RNA, 21 nt, synthetic construct
  source 1..21: mol_type = other RNA
gtcctgggtatggccctcccc

SEQ ID NO: 5053 - RNA, 21 nt, synthetic construct
  source 1..21: mol_type = other RNA
gtctccacgagctccgtgtcc

SEQ ID NO: 5054 - RNA, 21 nt, synthetic construct
  source 1..21: mol_type = other RNA
gtctttgggggctctgagggg

SEQ ID NO: 5055 - RNA, 21 nt, synthetic construct
  source 1..21: mol_type = other RNA
gtgacgggctcgggtagcccc

SEQ ID NO: 5056 - RNA, 21 nt, synthetic construct
  source 1..21: mol_type = other RNA
gtgactcaccaccccatctct

SEQ ID NO: 5057 - RNA, 21 nt, synthetic construct
  source 1..21: mol_type = other RNA
gtgagtcacgtgtgtctttgg

SEQ ID NO: 5058 - RNA, 21 nt, synthetic construct
  source 1..21: mol_type = other RNA
gtgcagcatgaggggctaccc

SEQ ID NO: 5059 - RNA, 21 nt, synthetic construct
  source 1..21: mol_type = other RNA
gtgccatgtgcagcatgaggg

SEQ ID NO: 5060 - RNA, 21 nt, synthetic construct
  source 1..21: mol_type = other RNA
gtgctgctggagtgtcccatg

SEQ ID NO: 5061 - RNA, 21 nt, synthetic construct
  source 1..21: mol_type = other RNA
gtggtgagtcacgtgtgtctt

SEQ ID NO: 5062 - RNA, 21 nt, synthetic construct
  source 1..21: mol_type = other RNA
gtgtcccatgagagatacaaa

SEQ ID NO: 5063 - RNA, 21 nt, synthetic construct
  source 1..21: mol_type = other RNA
gtgtcctgggtatggccctcc

SEQ ID NO: 5064 - RNA, 21 nt, synthetic construct
  source 1..21: mol_type = other RNA
gtgtctttgggggctctgagg

SEQ ID NO: 5065 - RNA, 21 nt, synthetic construct
  source 1..21: mol_type = other RNA
gtgtgtctttgggggctctga

SEQ ID NO: 5066 - RNA, 21 nt, synthetic construct
  source 1..21: mol_type = other RNA
taaggagggggatgggaggtc

SEQ ID NO: 5067 - RNA, 21 nt, synthetic construct
  source 1..21: mol_type = other RNA
tacaaagtgcctgaattttct

SEQ ID NO: 5068 - RNA, 21 nt, synthetic construct
  source 1..21: mol_type = other RNA
tacccaggacacggagctcgt

SEQ ID NO: 5069 - RNA, 21 nt, synthetic construct
  source 1..21: mol_type = other RNA
tacccgagcccgtcaccctga

SEQ ID NO: 5070 - RNA, 21 nt, synthetic construct
  source 1..21: mol_type = other RNA
tactccatctcagggtgacgg

SEQ ID NO: 5071 - RNA, 21 nt, synthetic construct
  source 1..21: mol_type = other RNA
tagcccctcatgctgcacatg

SEQ ID NO: 5072 - RNA, 21 nt, synthetic construct
  source 1..21: mol_type = other RNA
tatctctcatgggacactcca

SEQ ID NO: 5073 - RNA, 21 nt, synthetic construct
  source 1..21: mol_type = other RNA
tatggccctccccatcctgct

SEQ ID NO: 5074 - RNA, 21 nt, synthetic construct
  source 1..21: mol_type = other RNA
tcaccaccccatctctgacca

SEQ ID NO: 5075 - RNA, 21 nt, synthetic construct
  source 1..21: mol_type = other RNA
tcaccctgagatggagtaagg

SEQ ID NO: 5076 - RNA, 21 nt, synthetic construct
  source 1..21: mol_type = other RNA
tcacgtgtgtctttgggggct

SEQ ID NO: 5077 - RNA, 21 nt, synthetic construct
  source 1..21: mol_type = other RNA
tcagaaaattcaggcactttg

SEQ ID NO: 5078 - RNA, 21 nt, synthetic construct
  source 1..21: mol_type = other RNA
tcagagatggggtggtgagtc

SEQ ID NO: 5079 - RNA, 21 nt, synthetic construct
  source 1..21: mol_type = other RNA
tcagagcccccaaagacacac

SEQ ID NO: 5080 - RNA, 21 nt, synthetic construct
  source 1..21: mol_type = other RNA
tcaggcactttgtatctctca

SEQ ID NO: 5081 - RNA, 21 nt, synthetic construct
  source 1..21: mol_type = other RNA
tcagggtgacgggctcgggta

SEQ ID NO: 5082 - RNA, 21 nt, synthetic construct
  source 1..21: mol_type = other RNA
tcatggtcagagatggggtgg

SEQ ID NO: 5083 - RNA, 21 nt, synthetic construct
  source 1..21: mol_type = other RNA
tccacgagctccgtgtcctgg

SEQ ID NO: 5084 - RNA, 21 nt, synthetic construct
  source 1..21: mol_type = other RNA
tccatctcagggtgacgggct

SEQ ID NO: 5085 - RNA, 21 nt, synthetic construct
  source 1..21: mol_type = other RNA
tcccatccccctccttactcc

SEQ ID NO: 5086 - RNA, 21 nt, synthetic construct
  source 1..21: mol_type = other RNA
tcccatgagagatacaaagtg

SEQ ID NO: 5087 - RNA, 21 nt, synthetic construct
  source 1..21: mol_type = other RNA
tccccctccttactccatctc

SEQ ID NO: 5088 - RNA, 21 nt, synthetic construct
  source 1..21: mol_type = other RNA
tcccctcagagcccccaaaga

SEQ ID NO: 5089 - RNA, 21 nt, synthetic construct
  source 1..21: mol_type = other RNA
tccgtgtcctgggtatggccc

SEQ ID NO: 5090 - RNA, 21 nt, synthetic construct
  source 1..21: mol_type = other RNA
tcctgggtatggccctcccca

SEQ ID NO: 5091 - RNA, 21 nt, synthetic construct
  source 1..21: mol_type = other RNA
tccttactccatctcagggtg

SEQ ID NO: 5092 - RNA, 21 nt, synthetic construct
  source 1..21: mol_type = other RNA
tcgggtagcccctcatgctgc

SEQ ID NO: 5093 - RNA, 21 nt, synthetic construct
  source 1..21: mol_type = other RNA
tctcagggtgacgggctcggg

SEQ ID NO: 5094 - RNA, 21 nt, synthetic construct
  source 1..21: mol_type = other RNA
tctcatgggacactccagcag

SEQ ID NO: 5095 - RNA, 21 nt, synthetic construct
  source 1..21: mol_type = other RNA
tctccacgagctccgtgtcct

SEQ ID NO: 5096 - RNA, 21 nt, synthetic construct
  source 1..21: mol_type = other RNA
tctctcatgggacactccagc

SEQ ID NO: 5097 - RNA, 21 nt, synthetic construct
  source 1..21: mol_type = other RNA
tctgactcttcccctcagagc

SEQ ID NO: 5098 - RNA, 21 nt, synthetic construct
  source 1..21: mol_type = other RNA
tcttcccctcagagcccccaa

SEQ ID NO: 5099 - RNA, 21 nt, synthetic construct
  source 1..21: mol_type = other RNA
tctttgggggctctgagggga

SEQ ID NO: 5100 - RNA, 21 nt, synthetic construct
  source 1..21: mol_type = other RNA
tgaattttctgactcttcccc

SEQ ID NO: 5101 - RNA, 21 nt, synthetic construct
  source 1..21: mol_type = other RNA
tgacctcccatccccctcctt

SEQ ID NO: 5102 - RNA, 21 nt, synthetic construct
  source 1..21: mol_type = other RNA
tgacctggcagcaggatgggg

SEQ ID NO: 5103 - RNA, 21 nt, synthetic construct
  source 1..21: mol_type = other RNA
tgacgggctcgggtagcccct

SEQ ID NO: 5104 - RNA, 21 nt, synthetic construct
  source 1..21: mol_type = other RNA
tgactcaccaccccatctctg

SEQ ID NO: 5105 - RNA, 21 nt, synthetic construct
  source 1..21: mol_type = other RNA
tgactcttcccctcagagccc

SEQ ID NO: 5106 - RNA, 21 nt, synthetic construct
  source 1..21: mol_type = other RNA
tgagaagagacatgacctccc

SEQ ID NO: 5107 - RNA, 21 nt, synthetic construct
  source 1..21: mol_type = other RNA
tgagagatacaaagtgcctga

SEQ ID NO: 5108 - RNA, 21 nt, synthetic construct
  source 1..21: mol_type = other RNA
tgagatggagtaaggaggggg

SEQ ID NO: 5109 - RNA, 21 nt, synthetic construct
  source 1..21: mol_type = other RNA
tgaggggctacccgagcccgt

SEQ ID NO: 5110 - RNA, 21 nt, synthetic construct
  source 1..21: mol_type = other RNA
tgagtcacgtgtgtctttggg

SEQ ID NO: 5111 - RNA, 21 nt, synthetic construct
  source 1..21: mol_type = other RNA
tgcagcatgaggggctacccg

SEQ ID NO: 5112 - RNA, 21 nt, synthetic construct
  source 1..21: mol_type = other RNA
tgccatgtgcagcatgagggg

SEQ ID NO: 5113 - RNA, 21 nt, synthetic construct
  source 1..21: mol_type = other RNA
tgctgctggagtgtcccatga

SEQ ID NO: 5114 - RNA, 21 nt, synthetic construct
  source 1..21: mol_type = other RNA
tgctggagtgtcccatgagag

SEQ ID NO: 5115 - RNA, 21 nt, synthetic construct
  source 1..21: mol_type = other RNA
tggagtaaggagggggatggg

SEQ ID NO: 5116 - RNA, 21 nt, synthetic construct
  source 1..21: mol_type = other RNA
tggagtgtcccatgagagata

SEQ ID NO: 5117 - RNA, 21 nt, synthetic construct
  source 1..21: mol_type = other RNA
tggcagcaggatggggagggc

SEQ ID NO: 5118 - RNA, 21 nt, synthetic construct
  source 1..21: mol_type = other RNA
tggccctccccatcctgctgc

SEQ ID NO: 5119 - RNA, 21 nt, synthetic construct
  source 1..21: mol_type = other RNA
tggcctcatggtcagagatgg

SEQ ID NO: 5120 - RNA, 21 nt, synthetic construct
  source 1..21: mol_type = other RNA
tggggagggccatacccagga

SEQ ID NO: 5121 - RNA, 21 nt, synthetic construct
  source 1..21: mol_type = other RNA
tgggggctctgaggggaagag

SEQ ID NO: 5122 - RNA, 21 nt, synthetic construct
  source 1..21: mol_type = other RNA
tggggtggtgagtcacgtgtg

SEQ ID NO: 5123 - RNA, 21 nt, synthetic construct
  source 1..21: mol_type = other RNA
tgggtatggccctccccatcc

SEQ ID NO: 5124 - RNA, 21 nt, synthetic construct
  source 1..21: mol_type = other RNA
tgggtgctgctggagtgtccc

SEQ ID NO: 5125 - RNA, 21 nt, synthetic construct
  source 1..21: mol_type = other RNA
tggtcagagatggggtggtga

SEQ ID NO: 5126 - RNA, 21 nt, synthetic construct
  source 1..21: mol_type = other RNA
tggtctccacgagctccgtgt

SEQ ID NO: 5127 - RNA, 21 nt, synthetic construct
  source 1..21: mol_type = other RNA
tggtgagtcacgtgtgtcttt

SEQ ID NO: 5128 - RNA, 21 nt, synthetic construct
  source 1..21: mol_type = other RNA
tgtatctctcatgggacactc

SEQ ID NO: 5129 - RNA, 21 nt, synthetic construct
  source 1..21: mol_type = other RNA
tgtcccatgagagatacaaag

SEQ ID NO: 5130 - RNA, 21 nt, synthetic construct
  source 1..21: mol_type = other RNA
tgtcctgggtatggccctccc

SEQ ID NO: 5131 - RNA, 21 nt, synthetic construct
  source 1..21: mol_type = other RNA
tgtctttgggggctctgaggg

SEQ ID NO: 5132 - RNA, 21 nt, synthetic construct
  source 1..21: mol_type = other RNA
tgtgcagcatgaggggctacc

SEQ ID NO: 5133 - RNA, 21 nt, synthetic construct
  source 1..21: mol_type = other RNA
tgtgtctttgggggctctgag

SEQ ID NO: 5134 - RNA, 21 nt, synthetic construct
  source 1..21: mol_type = other RNA
ttactccatctcagggtgacg

SEQ ID NO: 5135 - RNA, 21 nt, synthetic construct
  source 1..21: mol_type = other RNA
ttcaggcactttgtatctctc

SEQ ID NO: 5136 - RNA, 21 nt, synthetic construct
  source 1..21: mol_type = other RNA
ttcccctcagagcccccaaag

SEQ ID NO: 5137 - RNA, 21 nt, synthetic construct
  source 1..21: mol_type = other RNA
ttctgactcttcccctcagag

SEQ ID NO: 5138 - RNA, 21 nt, synthetic construct
  source 1..21: mol_type = other RNA
ttgggggctctgaggggaaga

SEQ ID NO: 5139 - RNA, 21 nt, synthetic construct
  source 1..21: mol_type = other RNA
ttgtatctctcatgggacact

SEQ ID NO: 5140 - RNA, 21 nt, synthetic construct
  source 1..21: mol_type = other RNA
tttctgactcttcccctcaga

SEQ ID NO: 5141 - RNA, 21 nt, synthetic construct
  source 1..21: mol_type = other RNA
tttgggggctctgaggggaag

SEQ ID NO: 5142 - RNA, 21 nt, synthetic construct
  source 1..21: mol_type = other RNA
tttgtatctctcatgggacac

SEQ ID NO: 5143 - RNA, 21 nt, synthetic construct
  source 1..21: mol_type = other RNA
ttttctgactcttcccctcag

SEQ ID NO: 5144 - RNA, 22 nt, synthetic construct
  source 1..22: mol_type = other RNA
aaaattcaggcactttgtatct

SEQ ID NO: 5145 - RNA, 22 nt, synthetic construct
  source 1..22: mol_type = other RNA
aaagacacacgtgactcaccac

SEQ ID NO: 5146 - RNA, 22 nt, synthetic construct
  source 1..22: mol_type = other RNA
aaattcaggcactttgtatctc

SEQ ID NO: 5147 - RNA, 22 nt, synthetic construct
  source 1..22: mol_type = other RNA
aagacacacgtgactcaccacc

SEQ ID NO: 5148 - RNA, 22 nt, synthetic construct
  source 1..22: mol_type = other RNA
aagagacatgacctcccatccc

SEQ ID NO: 5149 - RNA, 22 nt, synthetic construct
  source 1..22: mol_type = other RNA
aagagtcagaaaattcaggcac

SEQ ID NO: 5150 - RNA, 22 nt, synthetic construct
  source 1..22: mol_type = other RNA
aaggagggggatgggaggtcat

SEQ ID NO: 5151 - RNA, 22 nt, synthetic construct
  source 1..22: mol_type = other RNA
aattcaggcactttgtatctct

SEQ ID NO: 5152 - RNA, 22 nt, synthetic construct
  source 1..22: mol_type = other RNA
aattttctgactcttcccctca

SEQ ID NO: 5153 - RNA, 22 nt, synthetic construct
  source 1..22: mol_type = other RNA
acaaagtgcctgaattttctga

SEQ ID NO: 5154 - RNA, 22 nt, synthetic construct
  source 1..22: mol_type = other RNA
acacacgtgactcaccacccca

SEQ ID NO: 5155 - RNA, 22 nt, synthetic construct
  source 1..22: mol_type = other RNA
acacgtgactcaccaccccatc

SEQ ID NO: 5156 - RNA, 22 nt, synthetic construct
  source 1..22: mol_type = other RNA
acacgtgccatgtgcagcatga

SEQ ID NO: 5157 - RNA, 22 nt, synthetic construct
  source 1..22: mol_type = other RNA
acactgacctggcagcaggatg

SEQ ID NO: 5158 - RNA, 22 nt, synthetic construct
  source 1..22: mol_type = other RNA
acatgacctcccatccccctcc

SEQ ID NO: 5159 - RNA, 22 nt, synthetic construct
  source 1..22: mol_type = other RNA
acatgggtgctgctggagtgtc

SEQ ID NO: 5160 - RNA, 22 nt, synthetic construct
  source 1..22: mol_type = other RNA
acccgagcccgtcaccctgaga

SEQ ID NO: 5161 - RNA, 22 nt, synthetic construct
  source 1..22: mol_type = other RNA
accctgagatggagtaaggagg

SEQ ID NO: 5162 - RNA, 22 nt, synthetic construct
  source 1..22: mol_type = other RNA
acctcccatccccctccttact

SEQ ID NO: 5163 - RNA, 22 nt, synthetic construct
  source 1..22: mol_type = other RNA
acctggcagcaggatggggagg

SEQ ID NO: 5164 - RNA, 22 nt, synthetic construct
  source 1..22: mol_type = other RNA
acgagctccgtgtcctgggtat

SEQ ID NO: 5165 - RNA, 22 nt, synthetic construct
  source 1..22: mol_type = other RNA
acgggctcgggtagcccctcat

SEQ ID NO: 5166 - RNA, 22 nt, synthetic construct
  source 1..22: mol_type = other RNA
acgtgactcaccaccccatctc

SEQ ID NO: 5167 - RNA, 22 nt, synthetic construct
  source 1..22: mol_type = other RNA
acgtgccatgtgcagcatgagg

SEQ ID NO: 5168 - RNA, 22 nt, synthetic construct
  source 1..22: mol_type = other RNA
acgtgtgtctttgggggctctg

SEQ ID NO: 5169 - RNA, 22 nt, synthetic construct
  source 1..22: mol_type = other RNA
actcaccaccccatctctgacc

SEQ ID NO: 5170 - RNA, 22 nt, synthetic construct
  source 1..22: mol_type = other RNA
actccatctcagggtgacgggc

SEQ ID NO: 5171 - RNA, 22 nt, synthetic construct
  source 1..22: mol_type = other RNA
actcttcccctcagagccccca

SEQ ID NO: 5172 - RNA, 22 nt, synthetic construct
  source 1..22: mol_type = other RNA
actgacctggcagcaggatggg

SEQ ID NO: 5173 - RNA, 22 nt, synthetic construct
  source 1..22: mol_type = other RNA
actttgtatctctcatgggaca

SEQ ID NO: 5174 - RNA, 22 nt, synthetic construct
  source 1..22: mol_type = other RNA
agaaaattcaggcactttgtat

SEQ ID NO: 5175 - RNA, 22 nt, synthetic construct
  source 1..22: mol_type = other RNA
agaagagacatgacctcccatc

SEQ ID NO: 5176 - RNA, 22 nt, synthetic construct
  source 1..22: mol_type = other RNA
agacacacgtgactcaccaccc

SEQ ID NO: 5177 - RNA, 22 nt, synthetic construct
  source 1..22: mol_type = other RNA
agacatgacctcccatccccct

SEQ ID NO: 5178 - RNA, 22 nt, synthetic construct
  source 1..22: mol_type = other RNA
agagacatgacctcccatcccc

SEQ ID NO: 5179 - RNA, 22 nt, synthetic construct
  source 1..22: mol_type = other RNA
agagatacaaagtgcctgaatt

SEQ ID NO: 5180 - RNA, 22 nt, synthetic construct
  source 1..22: mol_type = other RNA
agagatggggtggtgagtcacg

SEQ ID NO: 5181 - RNA, 22 nt, synthetic construct
  source 1..22: mol_type = other RNA
agagcccccaaagacacacgtg

SEQ ID NO: 5182 - RNA, 22 nt, synthetic construct
  source 1..22: mol_type = other RNA
agagtcagaaaattcaggcact

SEQ ID NO: 5183 - RNA, 22 nt, synthetic construct
  source 1..22: mol_type = other RNA
agatacaaagtgcctgaatttt

SEQ ID NO: 5184 - RNA, 22 nt, synthetic construct
  source 1..22: mol_type = other RNA
agatggagtaaggagggggatg

SEQ ID NO: 5185 - RNA, 22 nt, synthetic construct
  source 1..22: mol_type = other RNA
agatggggtggtgagtcacgtg

SEQ ID NO: 5186 - RNA, 22 nt, synthetic construct
  source 1..22: mol_type = other RNA
agcaggatggggagggccatac

SEQ ID NO: 5187 - RNA, 22 nt, synthetic construct
  source 1..22: mol_type = other RNA
agcatgaggggctacccgagcc

SEQ ID NO: 5188 - RNA, 22 nt, synthetic construct
  source 1..22: mol_type = other RNA
agcccccaaagacacacgtgac

SEQ ID NO: 5189 - RNA, 22 nt, synthetic construct
  source 1..22: mol_type = other RNA
agcccgtcaccctgagatggag

SEQ ID NO: 5190 - RNA, 22 nt, synthetic construct
  source 1..22: mol_type = other RNA
agctccgtgtcctgggtatggc

SEQ ID NO: 5191 - RNA, 22 nt, synthetic construct
  source 1..22: mol_type = other RNA
aggagggggatgggaggtcatg

SEQ ID NO: 5192 - RNA, 22 nt, synthetic construct
  source 1..22: mol_type = other RNA
aggatggggagggccataccca

SEQ ID NO: 5193 - RNA, 22 nt, synthetic construct
  source 1..22: mol_type = other RNA
aggcactttgtatctctcatgg

SEQ ID NO: 5194 - RNA, 22 nt, synthetic construct
  source 1..22: mol_type = other RNA
agggccatacccaggacacgga

SEQ ID NO: 5195 - RNA, 22 nt, synthetic construct
  source 1..22: mol_type = other RNA
aggggctacccgagcccgtcac

SEQ ID NO: 5196 - RNA, 22 nt, synthetic construct
  source 1..22: mol_type = other RNA
agggggatgggaggtcatgtct

SEQ ID NO: 5197 - RNA, 22 nt, synthetic construct
  source 1..22: mol_type = other RNA
agggtgacgggctcgggtagcc

SEQ ID NO: 5198 - RNA, 22 nt, synthetic construct
  source 1..22: mol_type = other RNA
agtaaggagggggatgggaggt

SEQ ID NO: 5199 - RNA, 22 nt, synthetic construct
  source 1..22: mol_type = other RNA
agtcacgtgtgtctttgggggc

SEQ ID NO: 5200 - RNA, 22 nt, synthetic construct
  source 1..22: mol_type = other RNA
agtcagaaaattcaggcacttt

SEQ ID NO: 5201 - RNA, 22 nt, synthetic construct
  source 1..22: mol_type = other RNA
agtgtcccatgagagatacaaa

SEQ ID NO: 5202 - RNA, 22 nt, synthetic construct
  source 1..22: mol_type = other RNA
atacaaagtgcctgaattttct

SEQ ID NO: 5203 - RNA, 22 nt, synthetic construct
  source 1..22: mol_type = other RNA
atacccaggacacggagctcgt

SEQ ID NO: 5204 - RNA, 22 nt, synthetic construct
  source 1..22: mol_type = other RNA
atccccctccttactccatctc

SEQ ID NO: 5205 - RNA, 22 nt, synthetic construct
  source 1..22: mol_type = other RNA
atctcagggtgacgggctcggg

SEQ ID NO: 5206 - RNA, 22 nt, synthetic construct
  source 1..22: mol_type = other RNA
atctctcatgggacactccagc

SEQ ID NO: 5207 - RNA, 22 nt, synthetic construct
  source 1..22: mol_type = other RNA
atgacctcccatccccctcctt

SEQ ID NO: 5208 - RNA, 22 nt, synthetic construct
  source 1..22: mol_type = other RNA
atgagagatacaaagtgcctga

SEQ ID NO: 5209 - RNA, 22 nt, synthetic construct
  source 1..22: mol_type = other RNA
atgaggggctacccgagcccgt

SEQ ID NO: 5210 - RNA, 22 nt, synthetic construct
  source 1..22: mol_type = other RNA
atggagtaaggagggggatggg

SEQ ID NO: 5211 - RNA, 22 nt, synthetic construct
  source 1..22: mol_type = other RNA
atggccctccccatcctgctgc

SEQ ID NO: 5212 - RNA, 22 nt, synthetic construct
  source 1..22: mol_type = other RNA
atggggagggccatacccagga

SEQ ID NO: 5213 - RNA, 22 nt, synthetic construct
  source 1..22: mol_type = other RNA
atggggtggtgagtcacgtgtg

SEQ ID NO: 5214 - RNA, 22 nt, synthetic construct
  source 1..22: mol_type = other RNA
atgggtgctgctggagtgtccc

SEQ ID NO: 5215 - RNA, 22 nt, synthetic construct
  source 1..22: mol_type = other RNA
atggtcagagatggggtggtga

SEQ ID NO: 5216 - RNA, 22 nt, synthetic construct
  source 1..22: mol_type = other RNA
atgtgcagcatgaggggctacc

SEQ ID NO: 5217 - RNA, 22 nt, synthetic construct
  source 1..22: mol_type = other RNA
attcaggcactttgtatctctc

SEQ ID NO: 5218 - RNA, 22 nt, synthetic construct
  source 1..22: mol_type = other RNA
attttctgactcttcccctcag

SEQ ID NO: 5219 - RNA, 22 nt, synthetic construct
  source 1..22: mol_type = other RNA
caaagacacacgtgactcacca

SEQ ID NO: 5220 - RNA, 22 nt, synthetic construct
  source 1..22: mol_type = other RNA
cacacgtgactcaccaccccat

SEQ ID NO: 5221 - RNA, 22 nt, synthetic construct
  source 1..22: mol_type = other RNA
cacactgacctggcagcaggat

SEQ ID NO: 5222 - RNA, 22 nt, synthetic construct
  source 1..22: mol_type = other RNA
caccctgagatggagtaaggag

SEQ ID NO: 5223 - RNA, 22 nt, synthetic construct
  source 1..22: mol_type = other RNA
cacgagctccgtgtcctgggta

SEQ ID NO: 5224 - RNA, 22 nt, synthetic construct
  source 1..22: mol_type = other RNA
cacgtgactcaccaccccatct

SEQ ID NO: 5225 - RNA, 22 nt, synthetic construct
  source 1..22: mol_type = other RNA
cacgtgccatgtgcagcatgag

SEQ ID NO: 5226 - RNA, 22 nt, synthetic construct
  source 1..22: mol_type = other RNA
cacgtgtgtctttgggggctct

SEQ ID NO: 5227 - RNA, 22 nt, synthetic construct
  source 1..22: mol_type = other RNA
cactgacctggcagcaggatgg

SEQ ID NO: 5228 - RNA, 22 nt, synthetic construct
  source 1..22: mol_type = other RNA
cactttgtatctctcatgggac

SEQ ID NO: 5229 - RNA, 22 nt, synthetic construct
  source 1..22: mol_type = other RNA
cagaaaattcaggcactttgta

SEQ ID NO: 5230 - RNA, 22 nt, synthetic construct
  source 1..22: mol_type = other RNA
cagagatggggtggtgagtcac

SEQ ID NO: 5231 - RNA, 22 nt, synthetic construct
  source 1..22: mol_type = other RNA
cagagcccccaaagacacacgt

SEQ ID NO: 5232 - RNA, 22 nt, synthetic construct
  source 1..22: mol_type = other RNA
cagcaggatggggagggccata

SEQ ID NO: 5233 - RNA, 22 nt, synthetic construct
  source 1..22: mol_type = other RNA
cagcatgaggggctacccgagc

SEQ ID NO: 5234 - RNA, 22 nt, synthetic construct
  source 1..22: mol_type = other RNA
caggatggggagggccataccc

SEQ ID NO: 5235 - RNA, 22 nt, synthetic construct
  source 1..22: mol_type = other RNA
caggcactttgtatctctcatg

SEQ ID NO: 5236 - RNA, 22 nt, synthetic construct
  source 1..22: mol_type = other RNA
cagggtgacgggctcgggtagc

SEQ ID NO: 5237 - RNA, 22 nt, synthetic construct
  source 1..22: mol_type = other RNA
catacccaggacacggagctcg

SEQ ID NO: 5238 - RNA, 22 nt, synthetic construct
  source 1..22: mol_type = other RNA
catccccctccttactccatct

SEQ ID NO: 5239 - RNA, 22 nt, synthetic construct
  source 1..22: mol_type = other RNA
catctcagggtgacgggctcgg

SEQ ID NO: 5240 - RNA, 22 nt, synthetic construct
  source 1..22: mol_type = other RNA
catgacctcccatccccctcct

SEQ ID NO: 5241 - RNA, 22 nt, synthetic construct
  source 1..22: mol_type = other RNA
catgagagatacaaagtgcctg

SEQ ID NO: 5242 - RNA, 22 nt, synthetic construct
  source 1..22: mol_type = other RNA
catgaggggctacccgagcccg

SEQ ID NO: 5243 - RNA, 22 nt, synthetic construct
  source 1..22: mol_type = other RNA
catgggtgctgctggagtgtcc

SEQ ID NO: 5244 - RNA, 22 nt, synthetic construct
  source 1..22: mol_type = other RNA
catggtcagagatggggtggtg

SEQ ID NO: 5245 - RNA, 22 nt, synthetic construct
  source 1..22: mol_type = other RNA
catgtgcagcatgaggggctac

SEQ ID NO: 5246 - RNA, 22 nt, synthetic construct
  source 1..22: mol_type = other RNA
ccaaagacacacgtgactcacc

SEQ ID NO: 5247 - RNA, 22 nt, synthetic construct
  source 1..22: mol_type = other RNA
ccacgagctccgtgtcctgggt

SEQ ID NO: 5248 - RNA, 22 nt, synthetic construct
  source 1..22: mol_type = other RNA
ccatacccaggacacggagctc

SEQ ID NO: 5249 - RNA, 22 nt, synthetic construct
  source 1..22: mol_type = other RNA
ccatccccctccttactccatc

SEQ ID NO: 5250 - RNA, 22 nt, synthetic construct
  source 1..22: mol_type = other RNA
ccatctcagggtgacgggctcg

SEQ ID NO: 5251 - RNA, 22 nt, synthetic construct
  source 1..22: mol_type = other RNA
ccatgagagatacaaagtgcct

SEQ ID NO: 5252 - RNA, 22 nt, synthetic construct
  source 1..22: mol_type = other RNA
ccatgtgcagcatgaggggcta

SEQ ID NO: 5253 - RNA, 22 nt, synthetic construct
  source 1..22: mol_type = other RNA
cccaaagacacacgtgactcac

SEQ ID NO: 5254 - RNA, 22 nt, synthetic construct
  source 1..22: mol_type = other RNA
cccatccccctccttactccat

SEQ ID NO: 5255 - RNA, 22 nt, synthetic construct
  source 1..22: mol_type = other RNA
cccatgagagatacaaagtgcc

SEQ ID NO: 5256 - RNA, 22 nt, synthetic construct
  source 1..22: mol_type = other RNA
ccccaaagacacacgtgactca

SEQ ID NO: 5257 - RNA, 22 nt, synthetic construct
  source 1..22: mol_type = other RNA
cccccaaagacacacgtgactc

SEQ ID NO: 5258 - RNA, 22 nt, synthetic construct
  source 1..22: mol_type = other RNA
ccccctccttactccatctcag

SEQ ID NO: 5259 - RNA, 22 nt, synthetic construct
  source 1..22: mol_type = other RNA
cccctcagagcccccaaagaca

SEQ ID NO: 5260 - RNA, 22 nt, synthetic construct
  source 1..22: mol_type = other RNA
cccctccttactccatctcagg

SEQ ID NO: 5261 - RNA, 22 nt, synthetic construct
  source 1..22: mol_type = other RNA
cccgagcccgtcaccctgagat

SEQ ID NO: 5262 - RNA, 22 nt, synthetic construct
  source 1..22: mol_type = other RNA
cccgtcaccctgagatggagta

SEQ ID NO: 5263 - RNA, 22 nt, synthetic construct
  source 1..22: mol_type = other RNA
ccctcagagcccccaaagacac

SEQ ID NO: 5264 - RNA, 22 nt, synthetic construct
  source 1..22: mol_type = other RNA
ccctccccatcctgctgccagg

SEQ ID NO: 5265 - RNA, 22 nt, synthetic construct
  source 1..22: mol_type = other RNA
ccctccttactccatctcaggg

SEQ ID NO: 5266 - RNA, 22 nt, synthetic construct
  source 1..22: mol_type = other RNA
ccctgagaagagacatgacctc

SEQ ID NO: 5267 - RNA, 22 nt, synthetic construct
  source 1..22: mol_type = other RNA
ccctgagatggagtaaggaggg

SEQ ID NO: 5268 - RNA, 22 nt, synthetic construct
  source 1..22: mol_type = other RNA
ccgagcccgtcaccctgagatg

SEQ ID NO: 5269 - RNA, 22 nt, synthetic construct
  source 1..22: mol_type = other RNA
ccgtcaccctgagatggagtaa

SEQ ID NO: 5270 - RNA, 22 nt, synthetic construct
  source 1..22: mol_type = other RNA
ccgtgtcctgggtatggccctc

SEQ ID NO: 5271 - RNA, 22 nt, synthetic construct
  source 1..22: mol_type = other RNA
cctcagagcccccaaagacaca

SEQ ID NO: 5272 - RNA, 22 nt, synthetic construct
  source 1..22: mol_type = other RNA
cctcatggtcagagatggggtg

SEQ ID NO: 5273 - RNA, 22 nt, synthetic construct
  source 1..22: mol_type = other RNA
cctcccatccccctccttactc

SEQ ID NO: 5274 - RNA, 22 nt, synthetic construct
  source 1..22: mol_type = other RNA
cctccttactccatctcagggt

SEQ ID NO: 5275 - RNA, 22 nt, synthetic construct
  source 1..22: mol_type = other RNA
cctgaattttctgactcttccc

SEQ ID NO: 5276 - RNA, 22 nt, synthetic construct
  source 1..22: mol_type = other RNA
cctgagaagagacatgacctcc

SEQ ID NO: 5277 - RNA, 22 nt, synthetic construct
  source 1..22: mol_type = other RNA
cctgagatggagtaaggagggg

SEQ ID NO: 5278 - RNA, 22 nt, synthetic construct
  source 1..22: mol_type = other RNA
cctggcagcaggatggggaggg

SEQ ID NO: 5279 - RNA, 22 nt, synthetic construct
  source 1..22: mol_type = other RNA
cctgggtatggccctccccatc

SEQ ID NO: 5280 - RNA, 22 nt, synthetic construct
  source 1..22: mol_type = other RNA
ccttactccatctcagggtgac

SEQ ID NO: 5281 - RNA, 22 nt, synthetic construct
  source 1..22: mol_type = other RNA
cgagcccgtcaccctgagatgg

SEQ ID NO: 5282 - RNA, 22 nt, synthetic construct
  source 1..22: mol_type = other RNA
cgagctccgtgtcctgggtatg

SEQ ID NO: 5283 - RNA, 22 nt, synthetic construct
  source 1..22: mol_type = other RNA
cgggctcgggtagcccctcatg

SEQ ID NO: 5284 - RNA, 22 nt, synthetic construct
  source 1..22: mol_type = other RNA
cgggtagcccctcatgctgcac

SEQ ID NO: 5285 - RNA, 22 nt, synthetic construct
  source 1..22: mol_type = other RNA
cgtcaccctgagatggagtaag

SEQ ID NO: 5286 - RNA, 22 nt, synthetic construct
  source 1..22: mol_type = other RNA
cgtgactcaccaccccatctct

SEQ ID NO: 5287 - RNA, 22 nt, synthetic construct
  source 1..22: mol_type = other RNA
cgtgccatgtgcagcatgaggg

SEQ ID NO: 5288 - RNA, 22 nt, synthetic construct
  source 1..22: mol_type = other RNA
cgtgtcctgggtatggccctcc

SEQ ID NO: 5289 - RNA, 22 nt, synthetic construct
  source 1..22: mol_type = other RNA
cgtgtgtctttgggggctctga

SEQ ID NO: 5290 - RNA, 22 nt, synthetic construct
  source 1..22: mol_type = other RNA
ctacccgagcccgtcaccctga

SEQ ID NO: 5291 - RNA, 22 nt, synthetic construct
  source 1..22: mol_type = other RNA
ctcaccaccccatctctgacca

SEQ ID NO: 5292 - RNA, 22 nt, synthetic construct
  source 1..22: mol_type = other RNA
ctcagagcccccaaagacacac

SEQ ID NO: 5293 - RNA, 22 nt, synthetic construct
  source 1..22: mol_type = other RNA
ctcagggtgacgggctcgggta

SEQ ID NO: 5294 - RNA, 22 nt, synthetic construct
  source 1..22: mol_type = other RNA
ctcatggtcagagatggggtgg

SEQ ID NO: 5295 - RNA, 22 nt, synthetic construct
  source 1..22: mol_type = other RNA
ctccacgagctccgtgtcctgg

SEQ ID NO: 5296 - RNA, 22 nt, synthetic construct
  source 1..22: mol_type = other RNA
ctccatctcagggtgacgggct

SEQ ID NO: 5297 - RNA, 22 nt, synthetic construct
  source 1..22: mol_type = other RNA
ctcccatccccctccttactcc

SEQ ID NO: 5298 - RNA, 22 nt, synthetic construct
  source 1..22: mol_type = other RNA
ctccgtgtcctgggtatggccc

SEQ ID NO: 5299 - RNA, 22 nt, synthetic construct
  source 1..22: mol_type = other RNA
ctccttactccatctcagggtg

SEQ ID NO: 5300 - RNA, 22 nt, synthetic construct
  source 1..22: mol_type = other RNA
ctcgggtagcccctcatgctgc

SEQ ID NO: 5301 - RNA, 22 nt, synthetic construct
  source 1..22: mol_type = other RNA
ctctcatgggacactccagcag

SEQ ID NO: 5302 - RNA, 22 nt, synthetic construct
  source 1..22: mol_type = other RNA
ctctgaggggaagagtcagaaa

SEQ ID NO: 5303 - RNA, 22 nt, synthetic construct
  source 1..22: mol_type = other RNA
ctcttcccctcagagcccccaa

SEQ ID NO: 5304 - RNA, 22 nt, synthetic construct
  source 1..22: mol_type = other RNA
ctgaattttctgactcttcccc

SEQ ID NO: 5305 - RNA, 22 nt, synthetic construct
  source 1..22: mol_type = other RNA
ctgacctggcagcaggatgggg

SEQ ID NO: 5306 - RNA, 22 nt, synthetic construct
  source 1..22: mol_type = other RNA
ctgactcttcccctcagagccc

SEQ ID NO: 5307 - RNA, 22 nt, synthetic construct
  source 1..22: mol_type = other RNA
ctgagaagagacatgacctccc

SEQ ID NO: 5308 - RNA, 22 nt, synthetic construct
  source 1..22: mol_type = other RNA
ctgagatggagtaaggaggggg

SEQ ID NO: 5309 - RNA, 22 nt, synthetic construct
  source 1..22: mol_type = other RNA
ctgctggagtgtcccatgagag

SEQ ID NO: 5310 - RNA, 22 nt, synthetic construct
  source 1..22: mol_type = other RNA
ctggagtgtcccatgagagata

SEQ ID NO: 5311 - RNA, 22 nt, synthetic construct
  source 1..22: mol_type = other RNA
ctggcagcaggatggggagggc

SEQ ID NO: 5312 - RNA, 22 nt, synthetic construct
  source 1..22: mol_type = other RNA
ctgggtatggccctccccatcc

SEQ ID NO: 5313 - RNA, 22 nt, synthetic construct
  source 1..22: mol_type = other RNA
ctggtctccacgagctccgtgt

SEQ ID NO: 5314 - RNA, 22 nt, synthetic construct
  source 1..22: mol_type = other RNA
cttactccatctcagggtgacg

SEQ ID NO: 5315 - RNA, 22 nt, synthetic construct
  source 1..22: mol_type = other RNA
cttcccctcagagcccccaaag

SEQ ID NO: 5316 - RNA, 22 nt, synthetic construct
  source 1..22: mol_type = other RNA
ctttgggggctctgaggggaag

SEQ ID NO: 5317 - RNA, 22 nt, synthetic construct
  source 1..22: mol_type = other RNA
ctttgtatctctcatgggacac

SEQ ID NO: 5318 - RNA, 22 nt, synthetic construct
  source 1..22: mol_type = other RNA
gaaaattcaggcactttgtatc

SEQ ID NO: 5319 - RNA, 22 nt, synthetic construct
  source 1..22: mol_type = other RNA
gaagagacatgacctcccatcc

SEQ ID NO: 5320 - RNA, 22 nt, synthetic construct
  source 1..22: mol_type = other RNA
gaagagtcagaaaattcaggca

SEQ ID NO: 5321 - RNA, 22 nt, synthetic construct
  source 1..22: mol_type = other RNA
gaattttctgactcttcccctc

SEQ ID NO: 5322 - RNA, 22 nt, synthetic construct
  source 1..22: mol_type = other RNA
gacacacgtgactcaccacccc

SEQ ID NO: 5323 - RNA, 22 nt, synthetic construct
  source 1..22: mol_type = other RNA
gacatgacctcccatccccctc

SEQ ID NO: 5324 - RNA, 22 nt, synthetic construct
  source 1..22: mol_type = other RNA
gacctcccatccccctccttac

SEQ ID NO: 5325 - RNA, 22 nt, synthetic construct
  source 1..22: mol_type = other RNA
gacctggcagcaggatggggag

SEQ ID NO: 5326 - RNA, 22 nt, synthetic construct
  source 1..22: mol_type = other RNA
gacgggctcgggtagcccctca

SEQ ID NO: 5327 - RNA, 22 nt, synthetic construct
  source 1..22: mol_type = other RNA
gactcaccaccccatctctgac

SEQ ID NO: 5328 - RNA, 22 nt, synthetic construct
  source 1..22: mol_type = other RNA
gactcttcccctcagagccccc

SEQ ID NO: 5329 - RNA, 22 nt, synthetic construct
  source 1..22: mol_type = other RNA
gagaagagacatgacctcccat

SEQ ID NO: 5330 - RNA, 22 nt, synthetic construct
  source 1..22: mol_type = other RNA
gagacatgacctcccatccccc

SEQ ID NO: 5331 - RNA, 22 nt, synthetic construct
  source 1..22: mol_type = other RNA
gagagatacaaagtgcctgaat

SEQ ID NO: 5332 - RNA, 22 nt, synthetic construct
  source 1..22: mol_type = other RNA
gagatacaaagtgcctgaattt

SEQ ID NO: 5333 - RNA, 22 nt, synthetic construct
  source 1..22: mol_type = other RNA
gagatggagtaaggagggggat

SEQ ID NO: 5334 - RNA, 22 nt, synthetic construct
  source 1..22: mol_type = other RNA
gagatggggtggtgagtcacgt

SEQ ID NO: 5335 - RNA, 22 nt, synthetic construct
  source 1..22: mol_type = other RNA
gagcccccaaagacacacgtga

SEQ ID NO: 5336 - RNA, 22 nt, synthetic construct
  source 1..22: mol_type = other RNA
gagcccgtcaccctgagatgga

SEQ ID NO: 5337 - RNA, 22 nt, synthetic construct
  source 1..22: mol_type = other RNA
gagctccgtgtcctgggtatgg

SEQ ID NO: 5338 - RNA, 22 nt, synthetic construct
  source 1..22: mol_type = other RNA
gagggccatacccaggacacgg

SEQ ID NO: 5339 - RNA, 22 nt, synthetic construct
  source 1..22: mol_type = other RNA
gaggggctacccgagcccgtca

SEQ ID NO: 5340 - RNA, 22 nt, synthetic construct
  source 1..22: mol_type = other RNA
gagggggatgggaggtcatgtc

SEQ ID NO: 5341 - RNA, 22 nt, synthetic construct
  source 1..22: mol_type = other RNA
gagtaaggagggggatgggagg

SEQ ID NO: 5342 - RNA, 22 nt, synthetic construct
  source 1..22: mol_type = other RNA
gagtcacgtgtgtctttggggg

SEQ ID NO: 5343 - RNA, 22 nt, synthetic construct
  source 1..22: mol_type = other RNA
gagtcagaaaattcaggcactt

SEQ ID NO: 5344 - RNA, 22 nt, synthetic construct
  source 1..22: mol_type = other RNA
gagtgtcccatgagagatacaa

SEQ ID NO: 5345 - RNA, 22 nt, synthetic construct
  source 1..22: mol_type = other RNA
gatacaaagtgcctgaattttc

SEQ ID NO: 5346 - RNA, 22 nt, synthetic construct
  source 1..22: mol_type = other RNA
gatggagtaaggagggggatgg

SEQ ID NO: 5347 - RNA, 22 nt, synthetic construct
  source 1..22: mol_type = other RNA
gatggggagggccatacccagg

SEQ ID NO: 5348 - RNA, 22 nt, synthetic construct
  source 1..22: mol_type = other RNA
gatggggtggtgagtcacgtgt

SEQ ID NO: 5349 - RNA, 22 nt, synthetic construct
  source 1..22: mol_type = other RNA
gcactttgtatctctcatggga

SEQ ID NO: 5350 - RNA, 22 nt, synthetic construct
  source 1..22: mol_type = other RNA
gcagcaggatggggagggccat

SEQ ID NO: 5351 - RNA, 22 nt, synthetic construct
  source 1..22: mol_type = other RNA
gcagcatgaggggctacccgag

SEQ ID NO: 5352 - RNA, 22 nt, synthetic construct
  source 1..22: mol_type = other RNA
gcaggatggggagggccatacc

SEQ ID NO: 5353 - RNA, 22 nt, synthetic construct
  source 1..22: mol_type = other RNA
gcatgaggggctacccgagccc

SEQ ID NO: 5354 - RNA, 22 nt, synthetic construct
  source 1..22: mol_type = other RNA
gccatacccaggacacggagct

SEQ ID NO: 5355 - RNA, 22 nt, synthetic construct
  source 1..22: mol_type = other RNA
gccatgtgcagcatgaggggct

SEQ ID NO: 5356 - RNA, 22 nt, synthetic construct
  source 1..22: mol_type = other RNA
gcccccaaagacacacgtgact

SEQ ID NO: 5357 - RNA, 22 nt, synthetic construct
  source 1..22: mol_type = other RNA
gcccgtcaccctgagatggagt

SEQ ID NO: 5358 - RNA, 22 nt, synthetic construct
  source 1..22: mol_type = other RNA
gccctccccatcctgctgccag

SEQ ID NO: 5359 - RNA, 22 nt, synthetic construct
  source 1..22: mol_type = other RNA
gcctcatggtcagagatggggt

SEQ ID NO: 5360 - RNA, 22 nt, synthetic construct
  source 1..22: mol_type = other RNA
gcctgaattttctgactcttcc

SEQ ID NO: 5361 - RNA, 22 nt, synthetic construct
  source 1..22: mol_type = other RNA
gctacccgagcccgtcaccctg

SEQ ID NO: 5362 - RNA, 22 nt, synthetic construct
  source 1..22: mol_type = other RNA
gctccgtgtcctgggtatggcc

SEQ ID NO: 5363 - RNA, 22 nt, synthetic construct
  source 1..22: mol_type = other RNA
gctcgggtagcccctcatgctg

SEQ ID NO: 5364 - RNA, 22 nt, synthetic construct
  source 1..22: mol_type = other RNA
gctctgaggggaagagtcagaa

SEQ ID NO: 5365 - RNA, 22 nt, synthetic construct
  source 1..22: mol_type = other RNA
gctgctggagtgtcccatgaga

SEQ ID NO: 5366 - RNA, 22 nt, synthetic construct
  source 1..22: mol_type = other RNA
gctggagtgtcccatgagagat

SEQ ID NO: 5367 - RNA, 22 nt, synthetic construct
  source 1..22: mol_type = other RNA
ggaagagtcagaaaattcaggc

SEQ ID NO: 5368 - RNA, 22 nt, synthetic construct
  source 1..22: mol_type = other RNA
ggagggccatacccaggacacg

SEQ ID NO: 5369 - RNA, 22 nt, synthetic construct
  source 1..22: mol_type = other RNA
ggagggggatgggaggtcatgt

SEQ ID NO: 5370 - RNA, 22 nt, synthetic construct
  source 1..22: mol_type = other RNA
ggagtaaggagggggatgggag

SEQ ID NO: 5371 - RNA, 22 nt, synthetic construct
  source 1..22: mol_type = other RNA
ggagtgtcccatgagagataca

SEQ ID NO: 5372 - RNA, 22 nt, synthetic construct
  source 1..22: mol_type = other RNA
ggatggggagggccatacccag

SEQ ID NO: 5373 - RNA, 22 nt, synthetic construct
  source 1..22: mol_type = other RNA
ggcactttgtatctctcatggg

SEQ ID NO: 5374 - RNA, 22 nt, synthetic construct
  source 1..22: mol_type = other RNA
ggcagcaggatggggagggcca

SEQ ID NO: 5375 - RNA, 22 nt, synthetic construct
  source 1..22: mol_type = other RNA
ggccatacccaggacacggagc

SEQ ID NO: 5376 - RNA, 22 nt, synthetic construct
  source 1..22: mol_type = other RNA
ggccctccccatcctgctgcca

SEQ ID NO: 5377 - RNA, 22 nt, synthetic construct
  source 1..22: mol_type = other RNA
ggcctcatggtcagagatgggg

SEQ ID NO: 5378 - RNA, 22 nt, synthetic construct
  source 1..22: mol_type = other RNA
ggctacccgagcccgtcaccct

SEQ ID NO: 5379 - RNA, 22 nt, synthetic construct
  source 1..22: mol_type = other RNA
ggctcgggtagcccctcatgct

SEQ ID NO: 5380 - RNA, 22 nt, synthetic construct
  source 1..22: mol_type = other RNA
ggctctgaggggaagagtcaga

SEQ ID NO: 5381 - RNA, 22 nt, synthetic construct
  source 1..22: mol_type = other RNA
gggaagagtcagaaaattcagg

SEQ ID NO: 5382 - RNA, 22 nt, synthetic construct
  source 1..22: mol_type = other RNA
gggagggccatacccaggacac

SEQ ID NO: 5383 - RNA, 22 nt, synthetic construct
  source 1..22: mol_type = other RNA
gggccatacccaggacacggag

SEQ ID NO: 5384 - RNA, 22 nt, synthetic construct
  source 1..22: mol_type = other RNA
gggctacccgagcccgtcaccc

SEQ ID NO: 5385 - RNA, 22 nt, synthetic construct
  source 1..22: mol_type = other RNA
gggctcgggtagcccctcatgc

SEQ ID NO: 5386 - RNA, 22 nt, synthetic construct
  source 1..22: mol_type = other RNA
gggctctgaggggaagagtcag

SEQ ID NO: 5387 - RNA, 22 nt, synthetic construct
  source 1..22: mol_type = other RNA
ggggagggccatacccaggaca

SEQ ID NO: 5388 - RNA, 22 nt, synthetic construct
  source 1..22: mol_type = other RNA
ggggatgggaggtcatgtctct

SEQ ID NO: 5389 - RNA, 22 nt, synthetic construct
  source 1..22: mol_type = other RNA
ggggctacccgagcccgtcacc

SEQ ID NO: 5390 - RNA, 22 nt, synthetic construct
  source 1..22: mol_type = other RNA
ggggctctgaggggaagagtca

SEQ ID NO: 5391 - RNA, 22 nt, synthetic construct
  source 1..22: mol_type = other RNA
gggggatgggaggtcatgtctc

SEQ ID NO: 5392 - RNA, 22 nt, synthetic construct
  source 1..22: mol_type = other RNA
gggggctctgaggggaagagtc

SEQ ID NO: 5393 - RNA, 22 nt, synthetic construct
  source 1..22: mol_type = other RNA
ggggtggtgagtcacgtgtgtc

SEQ ID NO: 5394 - RNA, 22 nt, synthetic construct
  source 1..22: mol_type = other RNA
gggtagcccctcatgctgcaca

SEQ ID NO: 5395 - RNA, 22 nt, synthetic construct
  source 1..22: mol_type = other RNA
gggtatggccctccccatcctg

SEQ ID NO: 5396 - RNA, 22 nt, synthetic construct
  source 1..22: mol_type = other RNA
gggtgacgggctcgggtagccc

SEQ ID NO: 5397 - RNA, 22 nt, synthetic construct
  source 1..22: mol_type = other RNA
gggtgctgctggagtgtcccat

SEQ ID NO: 5398 - RNA, 22 nt, synthetic construct
  source 1..22: mol_type = other RNA
gggtggtgagtcacgtgtgtct

SEQ ID NO: 5399 - RNA, 22 nt, synthetic construct
  source 1..22: mol_type = other RNA
ggtagcccctcatgctgcacat

SEQ ID NO: 5400 - RNA, 22 nt, synthetic construct
  source 1..22: mol_type = other RNA
ggtatggccctccccatcctgc

SEQ ID NO: 5401 - RNA, 22 nt, synthetic construct
  source 1..22: mol_type = other RNA
ggtcagagatggggtggtgagt

SEQ ID NO: 5402 - RNA, 22 nt, synthetic construct
  source 1..22: mol_type = other RNA
ggtctccacgagctccgtgtcc

SEQ ID NO: 5403 - RNA, 22 nt, synthetic construct
  source 1..22: mol_type = other RNA
ggtgacgggctcgggtagcccc

SEQ ID NO: 5404 - RNA, 22 nt, synthetic construct
  source 1..22: mol_type = other RNA
ggtgagtcacgtgtgtctttgg

SEQ ID NO: 5405 - RNA, 22 nt, synthetic construct
  source 1..22: mol_type = other RNA
ggtgctgctggagtgtcccatg

SEQ ID NO: 5406 - RNA, 22 nt, synthetic construct
  source 1..22: mol_type = other RNA
ggtggtgagtcacgtgtgtctt

SEQ ID NO: 5407 - RNA, 22 nt, synthetic construct
  source 1..22: mol_type = other RNA
gtaaggagggggatgggaggtc

SEQ ID NO: 5408 - RNA, 22 nt, synthetic construct
  source 1..22: mol_type = other RNA
gtagcccctcatgctgcacatg

SEQ ID NO: 5409 - RNA, 22 nt, synthetic construct
  source 1..22: mol_type = other RNA
gtatctctcatgggacactcca

SEQ ID NO: 5410 - RNA, 22 nt, synthetic construct
  source 1..22: mol_type = other RNA
gtatggccctccccatcctgct

SEQ ID NO: 5411 - RNA, 22 nt, synthetic construct
  source 1..22: mol_type = other RNA
gtcaccctgagatggagtaagg

SEQ ID NO: 5412 - RNA, 22 nt, synthetic construct
  source 1..22: mol_type = other RNA
gtcacgtgtgtctttgggggct

SEQ ID NO: 5413 - RNA, 22 nt, synthetic construct
  source 1..22: mol_type = other RNA
gtcagaaaattcaggcactttg

SEQ ID NO: 5414 - RNA, 22 nt, synthetic construct
  source 1..22: mol_type = other RNA
gtcagagatggggtggtgagtc

SEQ ID NO: 5415 - RNA, 22 nt, synthetic construct
  source 1..22: mol_type = other RNA
gtcccatgagagatacaaagtg

SEQ ID NO: 5416 - RNA, 22 nt, synthetic construct
  source 1..22: mol_type = other RNA
gtcctgggtatggccctcccca

SEQ ID NO: 5417 - RNA, 22 nt, synthetic construct
  source 1..22: mol_type = other RNA
gtctccacgagctccgtgtcct

SEQ ID NO: 5418 - RNA, 22 nt, synthetic construct
  source 1..22: mol_type = other RNA
gtctttgggggctctgagggga

SEQ ID NO: 5419 - RNA, 22 nt, synthetic construct
  source 1..22: mol_type = other RNA
gtgacgggctcgggtagcccct

SEQ ID NO: 5420 - RNA, 22 nt, synthetic construct
  source 1..22: mol_type = other RNA
gtgactcaccaccccatctctg

SEQ ID NO: 5421 - RNA, 22 nt, synthetic construct
  source 1..22: mol_type = other RNA
gtgagtcacgtgtgtctttggg

SEQ ID NO: 5422 - RNA, 22 nt, synthetic construct
  source 1..22: mol_type = other RNA
gtgcagcatgaggggctacccg

SEQ ID NO: 5423 - RNA, 22 nt, synthetic construct
  source 1..22: mol_type = other RNA
gtgccatgtgcagcatgagggg

SEQ ID NO: 5424 - RNA, 22 nt, synthetic construct
  source 1..22: mol_type = other RNA
gtgctgctggagtgtcccatga

SEQ ID NO: 5425 - RNA, 22 nt, synthetic construct
  source 1..22: mol_type = other RNA
gtggcctcatggtcagagatgg

SEQ ID NO: 5426 - RNA, 22 nt, synthetic construct
  source 1..22: mol_type = other RNA
gtggtgagtcacgtgtgtcttt

SEQ ID NO: 5427 - RNA, 22 nt, synthetic construct
  source 1..22: mol_type = other RNA
gtgtcccatgagagatacaaag

SEQ ID NO: 5428 - RNA, 22 nt, synthetic construct
  source 1..22: mol_type = other RNA
gtgtcctgggtatggccctccc

SEQ ID NO: 5429 - RNA, 22 nt, synthetic construct
  source 1..22: mol_type = other RNA
gtgtctttgggggctctgaggg

SEQ ID NO: 5430 - RNA, 22 nt, synthetic construct
  source 1..22: mol_type = other RNA
gtgtgtctttgggggctctgag

SEQ ID NO: 5431 - RNA, 22 nt, synthetic construct
  source 1..22: mol_type = other RNA
taaggagggggatgggaggtca

SEQ ID NO: 5432 - RNA, 22 nt, synthetic construct
  source 1..22: mol_type = other RNA
tacaaagtgcctgaattttctg

SEQ ID NO: 5433 - RNA, 22 nt, synthetic construct
  source 1..22: mol_type = other RNA
tacacgtgccatgtgcagcatg

SEQ ID NO: 5434 - RNA, 22 nt, synthetic construct
  source 1..22: mol_type = other RNA
tacccaggacacggagctcgtg

SEQ ID NO: 5435 - RNA, 22 nt, synthetic construct
  source 1..22: mol_type = other RNA
tacccgagcccgtcaccctgag

SEQ ID NO: 5436 - RNA, 22 nt, synthetic construct
  source 1..22: mol_type = other RNA
tactccatctcagggtgacggg

SEQ ID NO: 5437 - RNA, 22 nt, synthetic construct
  source 1..22: mol_type = other RNA
tagcccctcatgctgcacatgg

SEQ ID NO: 5438 - RNA, 22 nt, synthetic construct
  source 1..22: mol_type = other RNA
tatctctcatgggacactccag

SEQ ID NO: 5439 - RNA, 22 nt, synthetic construct
  source 1..22: mol_type = other RNA
tatggccctccccatcctgctg

SEQ ID NO: 5440 - RNA, 22 nt, synthetic construct
  source 1..22: mol_type = other RNA
tcaccaccccatctctgaccat

SEQ ID NO: 5441 - RNA, 22 nt, synthetic construct
  source 1..22: mol_type = other RNA
tcaccctgagatggagtaagga

SEQ ID NO: 5442 - RNA, 22 nt, synthetic construct
  source 1..22: mol_type = other RNA
tcacgtgtgtctttgggggctc

SEQ ID NO: 5443 - RNA, 22 nt, synthetic construct
  source 1..22: mol_type = other RNA
tcagaaaattcaggcactttgt

SEQ ID NO: 5444 - RNA, 22 nt, synthetic construct
  source 1..22: mol_type = other RNA
tcagagatggggtggtgagtca

SEQ ID NO: 5445 - RNA, 22 nt, synthetic construct
  source 1..22: mol_type = other RNA
tcagagcccccaaagacacacg

SEQ ID NO: 5446 - RNA, 22 nt, synthetic construct
  source 1..22: mol_type = other RNA
tcaggcactttgtatctctcat

SEQ ID NO: 5447 - RNA, 22 nt, synthetic construct
  source 1..22: mol_type = other RNA
tcagggtgacgggctcgggtag

SEQ ID NO: 5448 - RNA, 22 nt, synthetic construct
  source 1..22: mol_type = other RNA
tcatggtcagagatggggtggt

SEQ ID NO: 5449 - RNA, 22 nt, synthetic construct
  source 1..22: mol_type = other RNA
tccacgagctccgtgtcctggg

SEQ ID NO: 5450 - RNA, 22 nt, synthetic construct
  source 1..22: mol_type = other RNA
tccatctcagggtgacgggctc

SEQ ID NO: 5451 - RNA, 22 nt, synthetic construct
  source 1..22: mol_type = other RNA
tcccatccccctccttactcca

SEQ ID NO: 5452 - RNA, 22 nt, synthetic construct
  source 1..22: mol_type = other RNA
tcccatgagagatacaaagtgc

SEQ ID NO: 5453 - RNA, 22 nt, synthetic construct
  source 1..22: mol_type = other RNA
tccccctccttactccatctca

SEQ ID NO: 5454 - RNA, 22 nt, synthetic construct
  source 1..22: mol_type = other RNA
tcccctcagagcccccaaagac

SEQ ID NO: 5455 - RNA, 22 nt, synthetic construct
  source 1..22: mol_type = other RNA
tccgtgtcctgggtatggccct

SEQ ID NO: 5456 - RNA, 22 nt, synthetic construct
  source 1..22: mol_type = other RNA
tcctgggtatggccctccccat

SEQ ID NO: 5457 - RNA, 22 nt, synthetic construct
  source 1..22: mol_type = other RNA
tccttactccatctcagggtga

SEQ ID NO: 5458 - RNA, 22 nt, synthetic construct
  source 1..22: mol_type = other RNA
tcgggtagcccctcatgctgca

SEQ ID NO: 5459 - RNA, 22 nt, synthetic construct
  source 1..22: mol_type = other RNA
tctcagggtgacgggctcgggt

SEQ ID NO: 5460 - RNA, 22 nt, synthetic construct
  source 1..22: mol_type = other RNA
tctcatgggacactccagcagc

SEQ ID NO: 5461 - RNA, 22 nt, synthetic construct
  source 1..22: mol_type = other RNA
tctccacgagctccgtgtcctg

SEQ ID NO: 5462 - RNA, 22 nt, synthetic construct
  source 1..22: mol_type = other RNA
tctctcatgggacactccagca

SEQ ID NO: 5463 - RNA, 22 nt, synthetic construct
  source 1..22: mol_type = other RNA
tctgactcttcccctcagagcc

SEQ ID NO: 5464 - RNA, 22 nt, synthetic construct
  source 1..22: mol_type = other RNA
tcttcccctcagagcccccaaa

SEQ ID NO: 5465 - RNA, 22 nt, synthetic construct
  source 1..22: mol_type = other RNA
tctttgggggctctgaggggaa

SEQ ID NO: 5466 - RNA, 22 nt, synthetic construct
  source 1..22: mol_type = other RNA
tgaattttctgactcttcccct

SEQ ID NO: 5467 - RNA, 22 nt, synthetic construct
  source 1..22: mol_type = other RNA
tgacctcccatccccctcctta

SEQ ID NO: 5468 - RNA, 22 nt, synthetic construct
  source 1..22: mol_type = other RNA
tgacctggcagcaggatgggga

SEQ ID NO: 5469 - RNA, 22 nt, synthetic construct
  source 1..22: mol_type = other RNA
tgacgggctcgggtagcccctc

SEQ ID NO: 5470 - RNA, 22 nt, synthetic construct
  source 1..22: mol_type = other RNA
tgactcaccaccccatctctga

SEQ ID NO: 5471 - RNA, 22 nt, synthetic construct
  source 1..22: mol_type = other RNA
tgactcttcccctcagagcccc

SEQ ID NO: 5472 - RNA, 22 nt, synthetic construct
  source 1..22: mol_type = other RNA
tgagaagagacatgacctccca

SEQ ID NO: 5473 - RNA, 22 nt, synthetic construct
  source 1..22: mol_type = other RNA
tgagagatacaaagtgcctgaa

SEQ ID NO: 5474 - RNA, 22 nt, synthetic construct
  source 1..22: mol_type = other RNA
tgagatggagtaaggaggggga

SEQ ID NO: 5475 - RNA, 22 nt, synthetic construct
  source 1..22: mol_type = other RNA
tgaggggctacccgagcccgtc

SEQ ID NO: 5476 - RNA, 22 nt, synthetic construct
  source 1..22: mol_type = other RNA
tgagtcacgtgtgtctttgggg

SEQ ID NO: 5477 - RNA, 22 nt, synthetic construct
  source 1..22: mol_type = other RNA
tgcagcatgaggggctacccga

SEQ ID NO: 5478 - RNA, 22 nt, synthetic construct
  source 1..22: mol_type = other RNA
tgccatgtgcagcatgaggggc

SEQ ID NO: 5479 - RNA, 22 nt, synthetic construct
  source 1..22: mol_type = other RNA
tgctgctggagtgtcccatgag

SEQ ID NO: 5480 - RNA, 22 nt, synthetic construct
  source 1..22: mol_type = other RNA
tgctggagtgtcccatgagaga

SEQ ID NO: 5481 - RNA, 22 nt, synthetic construct
  source 1..22: mol_type = other RNA
tggagtaaggagggggatggga

SEQ ID NO: 5482 - RNA, 22 nt, synthetic construct
  source 1..22: mol_type = other RNA
tggagtgtcccatgagagatac

SEQ ID NO: 5483 - RNA, 22 nt, synthetic construct
  source 1..22: mol_type = other RNA
tggcagcaggatggggagggcc

SEQ ID NO: 5484 - RNA, 22 nt, synthetic construct
  source 1..22: mol_type = other RNA
tggccctccccatcctgctgcc

SEQ ID NO: 5485 - RNA, 22 nt, synthetic construct
  source 1..22: mol_type = other RNA
tggcctcatggtcagagatggg

SEQ ID NO: 5486 - RNA, 22 nt, synthetic construct
  source 1..22: mol_type = other RNA
tggggagggccatacccaggac

SEQ ID NO: 5487 - RNA, 22 nt, synthetic construct
  source 1..22: mol_type = other RNA
tgggggctctgaggggaagagt

SEQ ID NO: 5488 - RNA, 22 nt, synthetic construct
  source 1..22: mol_type = other RNA
tggggtggtgagtcacgtgtgt

SEQ ID NO: 5489 - RNA, 22 nt, synthetic construct
  source 1..22: mol_type = other RNA
tgggtatggccctccccatcct

SEQ ID NO: 5490 - RNA, 22 nt, synthetic construct
  source 1..22: mol_type = other RNA
tgggtgctgctggagtgtccca

SEQ ID NO: 5491 - RNA, 22 nt, synthetic construct
  source 1..22: mol_type = other RNA
tggtcagagatggggtggtgag

SEQ ID NO: 5492 - RNA, 22 nt, synthetic construct
  source 1..22: mol_type = other RNA
tggtctccacgagctccgtgtc

SEQ ID NO: 5493 - RNA, 22 nt, synthetic construct
  source 1..22: mol_type = other RNA
tggtgagtcacgtgtgtctttg

SEQ ID NO: 5494 - RNA, 22 nt, synthetic construct
  source 1..22: mol_type = other RNA
tgtatctctcatgggacactcc

SEQ ID NO: 5495 - RNA, 22 nt, synthetic construct
  source 1..22: mol_type = other RNA
tgtcccatgagagatacaaagt

SEQ ID NO: 5496 - RNA, 22 nt, synthetic construct
  source 1..22: mol_type = other RNA
tgtcctgggtatggccctcccc

SEQ ID NO: 5497 - RNA, 22 nt, synthetic construct
  source 1..22: mol_type = other RNA
tgtctttgggggctctgagggg

SEQ ID NO: 5498 - RNA, 22 nt, synthetic construct
  source 1..22: mol_type = other RNA
tgtgcagcatgaggggctaccc

SEQ ID NO: 5499 - RNA, 22 nt, synthetic construct
  source 1..22: mol_type = other RNA
tgtgtctttgggggctctgagg

SEQ ID NO: 5500 - RNA, 22 nt, synthetic construct
  source 1..22: mol_type = other RNA
ttactccatctcagggtgacgg

SEQ ID NO: 5501 - RNA, 22 nt, synthetic construct
  source 1..22: mol_type = other RNA
ttcaggcactttgtatctctca

SEQ ID NO: 5502 - RNA, 22 nt, synthetic construct
  source 1..22: mol_type = other RNA
ttcccctcagagcccccaaaga

SEQ ID NO: 5503 - RNA, 22 nt, synthetic construct
  source 1..22: mol_type = other RNA
ttctgactcttcccctcagagc

SEQ ID NO: 5504 - RNA, 22 nt, synthetic construct
  source 1..22: mol_type = other RNA
ttgggggctctgaggggaagag

SEQ ID NO: 5505 - RNA, 22 nt, synthetic construct
  source 1..22: mol_type = other RNA
ttgtatctctcatgggacactc

SEQ ID NO: 5506 - RNA, 22 nt, synthetic construct
  source 1..22: mol_type = other RNA
tttctgactcttcccctcagag

SEQ ID NO: 5507 - RNA, 22 nt, synthetic construct
  source 1..22: mol_type = other RNA
tttgggggctctgaggggaaga

SEQ ID NO: 5508 - RNA, 22 nt, synthetic construct
  source 1..22: mol_type = other RNA
tttgtatctctcatgggacact

SEQ ID NO: 5509 - RNA, 22 nt, synthetic construct
  source 1..22: mol_type = other RNA
ttttctgactcttcccctcaga

SEQ ID NO: 5510 - RNA, 20 nt, synthetic construct
  source 1..20: mol_type = other RNA
aaaactcagaccccaccctt

SEQ ID NO: 5511 - RNA, 20 nt, synthetic construct
  source 1..20: mol_type = other RNA
aaaagaggggaacgtaaggg

SEQ ID NO: 5512 - RNA, 20 nt, synthetic construct
  source 1..20: mol_type = other RNA
aaactcagaccccacccttc

SEQ ID NO: 5513 - RNA, 20 nt, synthetic construct
  source 1..20: mol_type = other RNA
aaagaggggaacgtaagggg

SEQ ID NO: 5514 - RNA, 20 nt, synthetic construct
  source 1..20: mol_type = other RNA
aaccacagctccagagacca

SEQ ID NO: 5515 - RNA, 20 nt, synthetic construct
  source 1..20: mol_type = other RNA
aacgtaaggggccctgaccc

SEQ ID NO: 5516 - RNA, 20 nt, synthetic construct
  source 1..20: mol_type = other RNA
aactcagaccccacccttct

SEQ ID NO: 5517 - RNA, 20 nt, synthetic construct
  source 1..20: mol_type = other RNA
aagaaaactcagaccccacc

SEQ ID NO: 5518 - RNA, 20 nt, synthetic construct
  source 1..20: mol_type = other RNA
aagaagagctcaggtgggga

SEQ ID NO: 5519 - RNA, 20 nt, synthetic construct
  source 1..20: mol_type = other RNA
aagagctcaggtggggaagg

SEQ ID NO: 5520 - RNA, 20 nt, synthetic construct
  source 1..20: mol_type = other RNA
aagaggggaacgtaaggggc

SEQ ID NO: 5521 - RNA, 20 nt, synthetic construct
  source 1..20: mol_type = other RNA
aagccggctctgggaaaaga

SEQ ID NO: 5522 - RNA, 20 nt, synthetic construct
  source 1..20: mol_type = other RNA
aagggagaagggtggggtct

SEQ ID NO: 5523 - RNA, 20 nt, synthetic construct
  source 1..20: mol_type = other RNA
aaggggccctgacccccagg

SEQ ID NO: 5524 - RNA, 20 nt, synthetic construct
  source 1..20: mol_type = other RNA
acaagaaaactcagacccca

SEQ ID NO: 5525 - RNA, 20 nt, synthetic construct
  source 1..20: mol_type = other RNA
acagatccaaggagaaccag

SEQ ID NO: 5526 - RNA, 20 nt, synthetic construct
  source 1..20: mol_type = other RNA
acagcagcaaccacagctcc

SEQ ID NO: 5527 - RNA, 20 nt, synthetic construct
  source 1..20: mol_type = other RNA
acagctccagagaccacaga

SEQ ID NO: 5528 - RNA, 20 nt, synthetic construct
  source 1..20: mol_type = other RNA
accacagatccaaggagaac

SEQ ID NO: 5529 - RNA, 20 nt, synthetic construct
  source 1..20: mol_type = other RNA
accacagctccagagaccac

SEQ ID NO: 5530 - RNA, 20 nt, synthetic construct
  source 1..20: mol_type = other RNA
accccacccttctcccttcc

SEQ ID NO: 5531 - RNA, 20 nt, synthetic construct
  source 1..20: mol_type = other RNA
acccccaggcctcagccctg

SEQ ID NO: 5532 - RNA, 20 nt, synthetic construct
  source 1..20: mol_type = other RNA
acccttctcccttccccacc

SEQ ID NO: 5533 - RNA, 20 nt, synthetic construct
  source 1..20: mol_type = other RNA
acctgagctcttcttcctcc

SEQ ID NO: 5534 - RNA, 20 nt, synthetic construct
  source 1..20: mol_type = other RNA
acgatggggatggtgggctg

SEQ ID NO: 5535 - RNA, 20 nt, synthetic construct
  source 1..20: mol_type = other RNA
acgtaaggggccctgacccc

SEQ ID NO: 5536 - RNA, 20 nt, synthetic construct
  source 1..20: mol_type = other RNA
acgttcccctcttttcccag

SEQ ID NO: 5537 - RNA, 20 nt, synthetic construct
  source 1..20: mol_type = other RNA
actcagaccccacccttctc

SEQ ID NO: 5538 - RNA, 20 nt, synthetic construct
  source 1..20: mol_type = other RNA
agaaaactcagaccccaccc

SEQ ID NO: 5539 - RNA, 20 nt, synthetic construct
  source 1..20: mol_type = other RNA
agaagagctcaggtggggaa

SEQ ID NO: 5540 - RNA, 20 nt, synthetic construct
  source 1..20: mol_type = other RNA
agaccacagatccaaggaga

SEQ ID NO: 5541 - RNA, 20 nt, synthetic construct
  source 1..20: mol_type = other RNA
agaccccacccttctccctt

SEQ ID NO: 5542 - RNA, 20 nt, synthetic construct
  source 1..20: mol_type = other RNA
agagaccacagatccaagga

SEQ ID NO: 5543 - RNA, 20 nt, synthetic construct
  source 1..20: mol_type = other RNA
agagccggcttcccagccca

SEQ ID NO: 5544 - RNA, 20 nt, synthetic construct
  source 1..20: mol_type = other RNA
agagctcaggtggggaaggg

SEQ ID NO: 5545 - RNA, 20 nt, synthetic construct
  source 1..20: mol_type = other RNA
agaggggaacgtaaggggcc

SEQ ID NO: 5546 - RNA, 20 nt, synthetic construct
  source 1..20: mol_type = other RNA
agatccaaggagaaccaggc

SEQ ID NO: 5547 - RNA, 20 nt, synthetic construct
  source 1..20: mol_type = other RNA
agcaaccacagctccagaga

SEQ ID NO: 5548 - RNA, 20 nt, synthetic construct
  source 1..20: mol_type = other RNA
agcagcaaccacagctccag

SEQ ID NO: 5549 - RNA, 20 nt, synthetic construct
  source 1..20: mol_type = other RNA
agcccttccgcagggtcagg

SEQ ID NO: 5550 - RNA, 20 nt, synthetic construct
  source 1..20: mol_type = other RNA
agccggctctgggaaaagag

SEQ ID NO: 5551 - RNA, 20 nt, synthetic construct
  source 1..20: mol_type = other RNA
agccggcttcccagcccacc

SEQ ID NO: 5552 - RNA, 20 nt, synthetic construct
  source 1..20: mol_type = other RNA
agctcaggtggggaagggag

SEQ ID NO: 5553 - RNA, 20 nt, synthetic construct
  source 1..20: mol_type = other RNA
agctccagagaccacagatc

SEQ ID NO: 5554 - RNA, 20 nt, synthetic construct
  source 1..20: mol_type = other RNA
agctcttcttcctccatatc

SEQ ID NO: 5555 - RNA, 20 nt, synthetic construct
  source 1..20: mol_type = other RNA
agctgtggttgctgctgtga

SEQ ID NO: 5556 - RNA, 20 nt, synthetic construct
  source 1..20: mol_type = other RNA
aggaagaagagctcaggtgg

SEQ ID NO: 5557 - RNA, 20 nt, synthetic construct
  source 1..20: mol_type = other RNA
aggcctcagccctgaccctg

SEQ ID NO: 5558 - RNA, 20 nt, synthetic construct
  source 1..20: mol_type = other RNA
aggcctgggggtcagggccc

SEQ ID NO: 5559 - RNA, 20 nt, synthetic construct
  source 1..20: mol_type = other RNA
agggagaagggtggggtctg

SEQ ID NO: 5560 - RNA, 20 nt, synthetic construct
  source 1..20: mol_type = other RNA
agggccccttacgttcccct

SEQ ID NO: 5561 - RNA, 20 nt, synthetic construct
  source 1..20: mol_type = other RNA
aggggaacgtaaggggccct

SEQ ID NO: 5562 - RNA, 20 nt, synthetic construct
  source 1..20: mol_type = other RNA
aggtggggaagggagaaggg

SEQ ID NO: 5563 - RNA, 20 nt, synthetic construct
  source 1..20: mol_type = other RNA
atatcacagcagcaaccaca

SEQ ID NO: 5564 - RNA, 20 nt, synthetic construct
  source 1..20: mol_type = other RNA
atatggaggaagaagagctc

SEQ ID NO: 5565 - RNA, 20 nt, synthetic construct
  source 1..20: mol_type = other RNA
atcacagcagcaaccacagc

SEQ ID NO: 5566 - RNA, 20 nt, synthetic construct
  source 1..20: mol_type = other RNA
atcattgctggcctggttct

SEQ ID NO: 5567 - RNA, 20 nt, synthetic construct
  source 1..20: mol_type = other RNA
atccaaggagaaccaggcca

SEQ ID NO: 5568 - RNA, 20 nt, synthetic construct
  source 1..20: mol_type = other RNA
atctgtggtctctggagctg

SEQ ID NO: 5569 - RNA, 20 nt, synthetic construct
  source 1..20: mol_type = other RNA
atggaggaagaagagctcag

SEQ ID NO: 5570 - RNA, 20 nt, synthetic construct
  source 1..20: mol_type = other RNA
atggggatggtgggctggga

SEQ ID NO: 5571 - RNA, 20 nt, synthetic construct
  source 1..20: mol_type = other RNA
atggtgggctgggaagccgg

SEQ ID NO: 5572 - RNA, 20 nt, synthetic construct
  source 1..20: mol_type = other RNA
attgctggcctggttctcct

SEQ ID NO: 5573 - RNA, 20 nt, synthetic construct
  source 1..20: mol_type = other RNA
caaccacagctccagagacc

SEQ ID NO: 5574 - RNA, 20 nt, synthetic construct
  source 1..20: mol_type = other RNA
caagaaaactcagaccccac

SEQ ID NO: 5575 - RNA, 20 nt, synthetic construct
  source 1..20: mol_type = other RNA
cacagatccaaggagaacca

SEQ ID NO: 5576 - RNA, 20 nt, synthetic construct
  source 1..20: mol_type = other RNA
cacagcagcaaccacagctc

SEQ ID NO: 5577 - RNA, 20 nt, synthetic construct
  source 1..20: mol_type = other RNA
cacagctccagagaccacag

SEQ ID NO: 5578 - RNA, 20 nt, synthetic construct
  source 1..20: mol_type = other RNA
cacccttctcccttccccac

SEQ ID NO: 5579 - RNA, 20 nt, synthetic construct
  source 1..20: mol_type = other RNA
cacctgagctcttcttcctc

SEQ ID NO: 5580 - RNA, 20 nt, synthetic construct
  source 1..20: mol_type = other RNA
cacgatggggatggtgggct

SEQ ID NO: 5581 - RNA, 20 nt, synthetic construct
  source 1..20: mol_type = other RNA
cagaccccacccttctccct

SEQ ID NO: 5582 - RNA, 20 nt, synthetic construct
  source 1..20: mol_type = other RNA
cagagaccacagatccaagg

SEQ ID NO: 5583 - RNA, 20 nt, synthetic construct
  source 1..20: mol_type = other RNA
cagagccggcttcccagccc

SEQ ID NO: 5584 - RNA, 20 nt, synthetic construct
  source 1..20: mol_type = other RNA
cagatccaaggagaaccagg

SEQ ID NO: 5585 - RNA, 20 nt, synthetic construct
  source 1..20: mol_type = other RNA
cagcaaccacagctccagag

SEQ ID NO: 5586 - RNA, 20 nt, synthetic construct
  source 1..20: mol_type = other RNA
cagcagcaaccacagctcca

SEQ ID NO: 5587 - RNA, 20 nt, synthetic construct
  source 1..20: mol_type = other RNA
cagctccagagaccacagat

SEQ ID NO: 5588 - RNA, 20 nt, synthetic construct
  source 1..20: mol_type = other RNA
caggcctcagccctgaccct

SEQ ID NO: 5589 - RNA, 20 nt, synthetic construct
  source 1..20: mol_type = other RNA
cagggccccttacgttcccc

SEQ ID NO: 5590 - RNA, 20 nt, synthetic construct
  source 1..20: mol_type = other RNA
caggtggggaagggagaagg

SEQ ID NO: 5591 - RNA, 20 nt, synthetic construct
  source 1..20: mol_type = other RNA
catatcacagcagcaaccac

SEQ ID NO: 5592 - RNA, 20 nt, synthetic construct
  source 1..20: mol_type = other RNA
cattgctggcctggttctcc

SEQ ID NO: 5593 - RNA, 20 nt, synthetic construct
  source 1..20: mol_type = other RNA
ccacagatccaaggagaacc

SEQ ID NO: 5594 - RNA, 20 nt, synthetic construct
  source 1..20: mol_type = other RNA
ccacagctccagagaccaca

SEQ ID NO: 5595 - RNA, 20 nt, synthetic construct
  source 1..20: mol_type = other RNA
ccacccttctcccttcccca

SEQ ID NO: 5596 - RNA, 20 nt, synthetic construct
  source 1..20: mol_type = other RNA
ccacctgagctcttcttcct

SEQ ID NO: 5597 - RNA, 20 nt, synthetic construct
  source 1..20: mol_type = other RNA
ccacgatggggatggtgggc

SEQ ID NO: 5598 - RNA, 20 nt, synthetic construct
  source 1..20: mol_type = other RNA
ccagagaccacagatccaag

SEQ ID NO: 5599 - RNA, 20 nt, synthetic construct
  source 1..20: mol_type = other RNA
ccagagccggcttcccagcc

SEQ ID NO: 5600 - RNA, 20 nt, synthetic construct
  source 1..20: mol_type = other RNA
ccaggcctcagccctgaccc

SEQ ID NO: 5601 - RNA, 20 nt, synthetic construct
  source 1..20: mol_type = other RNA
ccatatcacagcagcaacca

SEQ ID NO: 5602 - RNA, 20 nt, synthetic construct
  source 1..20: mol_type = other RNA
cccacccttctcccttcccc

SEQ ID NO: 5603 - RNA, 20 nt, synthetic construct
  source 1..20: mol_type = other RNA
cccacctgagctcttcttcc

SEQ ID NO: 5604 - RNA, 20 nt, synthetic construct
  source 1..20: mol_type = other RNA
cccagagccggcttcccagc

SEQ ID NO: 5605 - RNA, 20 nt, synthetic construct
  source 1..20: mol_type = other RNA
cccaggcctcagccctgacc

SEQ ID NO: 5606 - RNA, 20 nt, synthetic construct
  source 1..20: mol_type = other RNA
ccccacccttctcccttccc

SEQ ID NO: 5607 - RNA, 20 nt, synthetic construct
  source 1..20: mol_type = other RNA
ccccacctgagctcttcttc

SEQ ID NO: 5608 - RNA, 20 nt, synthetic construct
  source 1..20: mol_type = other RNA
ccccaggcctcagccctgac

SEQ ID NO: 5609 - RNA, 20 nt, synthetic construct
  source 1..20: mol_type = other RNA
cccccaggcctcagccctga

SEQ ID NO: 5610 - RNA, 20 nt, synthetic construct
  source 1..20: mol_type = other RNA
cccctcttttcccagagccg

SEQ ID NO: 5611 - RNA, 20 nt, synthetic construct
  source 1..20: mol_type = other RNA
ccccttacgttcccctcttt

SEQ ID NO: 5612 - RNA, 20 nt, synthetic construct
  source 1..20: mol_type = other RNA
ccctcttttcccagagccgg

SEQ ID NO: 5613 - RNA, 20 nt, synthetic construct
  source 1..20: mol_type = other RNA
cccttacgttcccctctttt

SEQ ID NO: 5614 - RNA, 20 nt, synthetic construct
  source 1..20: mol_type = other RNA
cccttccgcagggtcagggc

SEQ ID NO: 5615 - RNA, 20 nt, synthetic construct
  source 1..20: mol_type = other RNA
cccttctcccttccccacct

SEQ ID NO: 5616 - RNA, 20 nt, synthetic construct
  source 1..20: mol_type = other RNA
ccgcagggtcagggctgagg

SEQ ID NO: 5617 - RNA, 20 nt, synthetic construct
  source 1..20: mol_type = other RNA
ccggctctgggaaaagaggg

SEQ ID NO: 5618 - RNA, 20 nt, synthetic construct
  source 1..20: mol_type = other RNA
ccggcttcccagcccaccat

SEQ ID NO: 5619 - RNA, 20 nt, synthetic construct
  source 1..20: mol_type = other RNA
cctcagccctgaccctgcgg

SEQ ID NO: 5620 - RNA, 20 nt, synthetic construct
  source 1..20: mol_type = other RNA
cctccatatcacagcagcaa

SEQ ID NO: 5621 - RNA, 20 nt, synthetic construct
  source 1..20: mol_type = other RNA
cctcttttcccagagccggc

SEQ ID NO: 5622 - RNA, 20 nt, synthetic construct
  source 1..20: mol_type = other RNA
cctgagctcttcttcctcca

SEQ ID NO: 5623 - RNA, 20 nt, synthetic construct
  source 1..20: mol_type = other RNA
cctgggggtcagggcccctt

SEQ ID NO: 5624 - RNA, 20 nt, synthetic construct
  source 1..20: mol_type = other RNA
cctggttctccttggatctg

SEQ ID NO: 5625 - RNA, 20 nt, synthetic construct
  source 1..20: mol_type = other RNA
ccttacgttcccctcttttc

SEQ ID NO: 5626 - RNA, 20 nt, synthetic construct
  source 1..20: mol_type = other RNA
ccttccgcagggtcagggct

SEQ ID NO: 5627 - RNA, 20 nt, synthetic construct
  source 1..20: mol_type = other RNA
ccttctcccttccccacctg

SEQ ID NO: 5628 - RNA, 20 nt, synthetic construct
  source 1..20: mol_type = other RNA
ccttggatctgtggtctctg

SEQ ID NO: 5629 - RNA, 20 nt, synthetic construct
  source 1..20: mol_type = other RNA
cgatggggatggtgggctgg

SEQ ID NO: 5630 - RNA, 20 nt, synthetic construct
  source 1..20: mol_type = other RNA
cgcagggtcagggctgaggc

SEQ ID NO: 5631 - RNA, 20 nt, synthetic construct
  source 1..20: mol_type = other RNA
cggctctgggaaaagagggg

SEQ ID NO: 5632 - RNA, 20 nt, synthetic construct
  source 1..20: mol_type = other RNA
cggcttcccagcccaccatc

SEQ ID NO: 5633 - RNA, 20 nt, synthetic construct
  source 1..20: mol_type = other RNA
cgtaaggggccctgaccccc

SEQ ID NO: 5634 - RNA, 20 nt, synthetic construct
  source 1..20: mol_type = other RNA
cgttcccctcttttcccaga

SEQ ID NO: 5635 - RNA, 20 nt, synthetic construct
  source 1..20: mol_type = other RNA
ctcagaccccacccttctcc

SEQ ID NO: 5636 - RNA, 20 nt, synthetic construct
  source 1..20: mol_type = other RNA
ctcagccctgaccctgcgga

SEQ ID NO: 5637 - RNA, 20 nt, synthetic construct
  source 1..20: mol_type = other RNA
ctcaggtggggaagggagaa

SEQ ID NO: 5638 - RNA, 20 nt, synthetic construct
  source 1..20: mol_type = other RNA
ctccagagaccacagatcca

SEQ ID NO: 5639 - RNA, 20 nt, synthetic construct
  source 1..20: mol_type = other RNA
ctccatatcacagcagcaac

SEQ ID NO: 5640 - RNA, 20 nt, synthetic construct
  source 1..20: mol_type = other RNA
ctcccttccccacctgagct

SEQ ID NO: 5641 - RNA, 20 nt, synthetic construct
  source 1..20: mol_type = other RNA
ctccttggatctgtggtctc

SEQ ID NO: 5642 - RNA, 20 nt, synthetic construct
  source 1..20: mol_type = other RNA
ctctggagctgtggttgctg

SEQ ID NO: 5643 - RNA, 20 nt, synthetic construct
  source 1..20: mol_type = other RNA
ctctgggaaaagaggggaac

SEQ ID NO: 5644 - RNA, 20 nt, synthetic construct
  source 1..20: mol_type = other RNA
ctcttcttcctccatatcac

SEQ ID NO: 5645 - RNA, 20 nt, synthetic construct
  source 1..20: mol_type = other RNA
ctcttttcccagagccggct

SEQ ID NO: 5646 - RNA, 20 nt, synthetic construct
  source 1..20: mol_type = other RNA
ctgagctcttcttcctccat

SEQ ID NO: 5647 - RNA, 20 nt, synthetic construct
  source 1..20: mol_type = other RNA
ctgaggcctgggggtcaggg

SEQ ID NO: 5648 - RNA, 20 nt, synthetic construct
  source 1..20: mol_type = other RNA
ctgctgtgatatggaggaag

SEQ ID NO: 5649 - RNA, 20 nt, synthetic construct
  source 1..20: mol_type = other RNA
ctggagctgtggttgctgct

SEQ ID NO: 5650 - RNA, 20 nt, synthetic construct
  source 1..20: mol_type = other RNA
ctggcctggttctccttgga

SEQ ID NO: 5651 - RNA, 20 nt, synthetic construct
  source 1..20: mol_type = other RNA
ctgggaaaagaggggaacgt

SEQ ID NO: 5652 - RNA, 20 nt, synthetic construct
  source 1..20: mol_type = other RNA
ctgggaagccggctctggga

SEQ ID NO: 5653 - RNA, 20 nt, synthetic construct
  source 1..20: mol_type = other RNA
ctgggggtcagggcccctta

SEQ ID NO: 5654 - RNA, 20 nt, synthetic construct
  source 1..20: mol_type = other RNA
ctggttctccttggatctgt

SEQ ID NO: 5655 - RNA, 20 nt, synthetic construct
  source 1..20: mol_type = other RNA
ctgtgatatggaggaagaag

SEQ ID NO: 5656 - RNA, 20 nt, synthetic construct
  source 1..20: mol_type = other RNA
ctgtggtctctggagctgtg

SEQ ID NO: 5657 - RNA, 20 nt, synthetic construct
  source 1..20: mol_type = other RNA
ctgtggttgctgctgtgata

SEQ ID NO: 5658 - RNA, 20 nt, synthetic construct
  source 1..20: mol_type = other RNA
cttacgttcccctcttttcc

SEQ ID NO: 5659 - RNA, 20 nt, synthetic construct
  source 1..20: mol_type = other RNA
cttccgcagggtcagggctg

SEQ ID NO: 5660 - RNA, 20 nt, synthetic construct
  source 1..20: mol_type = other RNA
cttcctccatatcacagcag

SEQ ID NO: 5661 - RNA, 20 nt, synthetic construct
  source 1..20: mol_type = other RNA
cttctcccttccccacctga

SEQ ID NO: 5662 - RNA, 20 nt, synthetic construct
  source 1..20: mol_type = other RNA
cttcttcctccatatcacag

SEQ ID NO: 5663 - RNA, 20 nt, synthetic construct
  source 1..20: mol_type = other RNA
cttggatctgtggtctctgg

SEQ ID NO: 5664 - RNA, 20 nt, synthetic construct
  source 1..20: mol_type = other RNA
cttttcccagagccggcttc

SEQ ID NO: 5665 - RNA, 20 nt, synthetic construct
  source 1..20: mol_type = other RNA
gaaaactcagaccccaccct

SEQ ID NO: 5666 - RNA, 20 nt, synthetic construct
  source 1..20: mol_type = other RNA
gaaaagaggggaacgtaagg

SEQ ID NO: 5667 - RNA, 20 nt, synthetic construct
  source 1..20: mol_type = other RNA
gaacgtaaggggccctgacc

SEQ ID NO: 5668 - RNA, 20 nt, synthetic construct
  source 1..20: mol_type = other RNA
gaagaagagctcaggtgggg

SEQ ID NO: 5669 - RNA, 20 nt, synthetic construct
  source 1..20: mol_type = other RNA
gaagagctcaggtggggaag

SEQ ID NO: 5670 - RNA, 20 nt, synthetic construct
  source 1..20: mol_type = other RNA
gaagccggctctgggaaaag

SEQ ID NO: 5671 - RNA, 20 nt, synthetic construct
  source 1..20: mol_type = other RNA
gaagggagaagggtggggtc

SEQ ID NO: 5672 - RNA, 20 nt, synthetic construct
  source 1..20: mol_type = other RNA
gaccacagatccaaggagaa

SEQ ID NO: 5673 - RNA, 20 nt, synthetic construct
  source 1..20: mol_type = other RNA
gaccccacccttctcccttc

SEQ ID NO: 5674 - RNA, 20 nt, synthetic construct
  source 1..20: mol_type = other RNA
gagaagggtggggtctgagt

SEQ ID NO: 5675 - RNA, 20 nt, synthetic construct
  source 1..20: mol_type = other RNA
gagaccacagatccaaggag

SEQ ID NO: 5676 - RNA, 20 nt, synthetic construct
  source 1..20: mol_type = other RNA
gagcccttccgcagggtcag

SEQ ID NO: 5677 - RNA, 20 nt, synthetic construct
  source 1..20: mol_type = other RNA
gagccggcttcccagcccac

SEQ ID NO: 5678 - RNA, 20 nt, synthetic construct
  source 1..20: mol_type = other RNA
gagctcaggtggggaaggga

SEQ ID NO: 5679 - RNA, 20 nt, synthetic construct
  source 1..20: mol_type = other RNA
gagctcttcttcctccatat

SEQ ID NO: 5680 - RNA, 20 nt, synthetic construct
  source 1..20: mol_type = other RNA
gagctgtggttgctgctgtg

SEQ ID NO: 5681 - RNA, 20 nt, synthetic construct
  source 1..20: mol_type = other RNA
gaggcctgggggtcagggcc

SEQ ID NO: 5682 - RNA, 20 nt, synthetic construct
  source 1..20: mol_type = other RNA
gaggggaacgtaaggggccc

SEQ ID NO: 5683 - RNA, 20 nt, synthetic construct
  source 1..20: mol_type = other RNA
gatatggaggaagaagagct

SEQ ID NO: 5684 - RNA, 20 nt, synthetic construct
  source 1..20: mol_type = other RNA
gatccaaggagaaccaggcc

SEQ ID NO: 5685 - RNA, 20 nt, synthetic construct
  source 1..20: mol_type = other RNA
gatctgtggtctctggagct

SEQ ID NO: 5686 - RNA, 20 nt, synthetic construct
  source 1..20: mol_type = other RNA
gatggggatggtgggctggg

SEQ ID NO: 5687 - RNA, 20 nt, synthetic construct
  source 1..20: mol_type = other RNA
gatggtgggctgggaagccg

SEQ ID NO: 5688 - RNA, 20 nt, synthetic construct
  source 1..20: mol_type = other RNA
gcaaccacagctccagagac

SEQ ID NO: 5689 - RNA, 20 nt, synthetic construct
  source 1..20: mol_type = other RNA
gcagcaaccacagctccaga

SEQ ID NO: 5690 - RNA, 20 nt, synthetic construct
  source 1..20: mol_type = other RNA
gccccttacgttcccctctt

SEQ ID NO: 5691 - RNA, 20 nt, synthetic construct
  source 1..20: mol_type = other RNA
gcccttccgcagggtcaggg

SEQ ID NO: 5692 - RNA, 20 nt, synthetic construct
  source 1..20: mol_type = other RNA
gccggctctgggaaaagagg

SEQ ID NO: 5693 - RNA, 20 nt, synthetic construct
  source 1..20: mol_type = other RNA
gccggcttcccagcccacca

SEQ ID NO: 5694 - RNA, 20 nt, synthetic construct
  source 1..20: mol_type = other RNA
gcctcagccctgaccctgcg

SEQ ID NO: 5695 - RNA, 20 nt, synthetic construct
  source 1..20: mol_type = other RNA
gcctgggggtcagggcccct

SEQ ID NO: 5696 - RNA, 20 nt, synthetic construct
  source 1..20: mol_type = other RNA
gcctggttctccttggatct

SEQ ID NO: 5697 - RNA, 20 nt, synthetic construct
  source 1..20: mol_type = other RNA
gctcaggtggggaagggaga

SEQ ID NO: 5698 - RNA, 20 nt, synthetic construct
  source 1..20: mol_type = other RNA
gctccagagaccacagatcc

SEQ ID NO: 5699 - RNA, 20 nt, synthetic construct
  source 1..20: mol_type = other RNA
gctctgggaaaagaggggaa

SEQ ID NO: 5700 - RNA, 20 nt, synthetic construct
  source 1..20: mol_type = other RNA
gctcttcttcctccatatca

SEQ ID NO: 5701 - RNA, 20 nt, synthetic construct
  source 1..20: mol_type = other RNA
gctgaggcctgggggtcagg

SEQ ID NO: 5702 - RNA, 20 nt, synthetic construct
  source 1..20: mol_type = other RNA
gctgctgtgatatggaggaa

SEQ ID NO: 5703 - RNA, 20 nt, synthetic construct
  source 1..20: mol_type = other RNA
gctggcctggttctccttgg

SEQ ID NO: 5704 - RNA, 20 nt, synthetic construct
  source 1..20: mol_type = other RNA
gctgggaagccggctctggg

SEQ ID NO: 5705 - RNA, 20 nt, synthetic construct
  source 1..20: mol_type = other RNA
gctgtgatatggaggaagaa

SEQ ID NO: 5706 - RNA, 20 nt, synthetic construct
  source 1..20: mol_type = other RNA
gctgtggttgctgctgtgat

SEQ ID NO: 5707 - RNA, 20 nt, synthetic construct
  source 1..20: mol_type = other RNA
gcttcccagcccaccatccc

SEQ ID NO: 5708 - RNA, 20 nt, synthetic construct
  source 1..20: mol_type = other RNA
ggaaaagaggggaacgtaag

SEQ ID NO: 5709 - RNA, 20 nt, synthetic construct
  source 1..20: mol_type = other RNA
ggaacgtaaggggccctgac

SEQ ID NO: 5710 - RNA, 20 nt, synthetic construct
  source 1..20: mol_type = other RNA
ggaagaagagctcaggtggg

SEQ ID NO: 5711 - RNA, 20 nt, synthetic construct
  source 1..20: mol_type = other RNA
ggaagccggctctgggaaaa

SEQ ID NO: 5712 - RNA, 20 nt, synthetic construct
  source 1..20: mol_type = other RNA
ggaagggagaagggtggggt

SEQ ID NO: 5713 - RNA, 20 nt, synthetic construct
  source 1..20: mol_type = other RNA
ggagaagggtggggtctgag

SEQ ID NO: 5714 - RNA, 20 nt, synthetic construct
  source 1..20: mol_type = other RNA
ggagcccttccgcagggtca

SEQ ID NO: 5715 - RNA, 20 nt, synthetic construct
  source 1..20: mol_type = other RNA
ggagctgtggttgctgctgt

SEQ ID NO: 5716 - RNA, 20 nt, synthetic construct
  source 1..20: mol_type = other RNA
ggatctgtggtctctggagc

SEQ ID NO: 5717 - RNA, 20 nt, synthetic construct
  source 1..20: mol_type = other RNA
ggatggtgggctgggaagcc

SEQ ID NO: 5718 - RNA, 20 nt, synthetic construct
  source 1..20: mol_type = other RNA
ggccccttacgttcccctct

SEQ ID NO: 5719 - RNA, 20 nt, synthetic construct
  source 1..20: mol_type = other RNA
ggcctcagccctgaccctgc

SEQ ID NO: 5720 - RNA, 20 nt, synthetic construct
  source 1..20: mol_type = other RNA
ggcctggttctccttggatc

SEQ ID NO: 5721 - RNA, 20 nt, synthetic construct
  source 1..20: mol_type = other RNA
ggctctgggaaaagagggga

SEQ ID NO: 5722 - RNA, 20 nt, synthetic construct
  source 1..20: mol_type = other RNA
ggctgaggcctgggggtcag

SEQ ID NO: 5723 - RNA, 20 nt, synthetic construct
  source 1..20: mol_type = other RNA
ggctgggaagccggctctgg

SEQ ID NO: 5724 - RNA, 20 nt, synthetic construct
  source 1..20: mol_type = other RNA
ggcttcccagcccaccatcc

SEQ ID NO: 5725 - RNA, 20 nt, synthetic construct
  source 1..20: mol_type = other RNA
gggaaaagaggggaacgtaa

SEQ ID NO: 5726 - RNA, 20 nt, synthetic construct
  source 1..20: mol_type = other RNA
gggaacgtaaggggccctga

SEQ ID NO: 5727 - RNA, 20 nt, synthetic construct
  source 1..20: mol_type = other RNA
gggaagccggctctgggaaa

SEQ ID NO: 5728 - RNA, 20 nt, synthetic construct
  source 1..20: mol_type = other RNA
gggaagggagaagggtgggg

SEQ ID NO: 5729 - RNA, 20 nt, synthetic construct
  source 1..20: mol_type = other RNA
gggagaagggtggggtctga

SEQ ID NO: 5730 - RNA, 20 nt, synthetic construct
  source 1..20: mol_type = other RNA
gggatggtgggctgggaagc

SEQ ID NO: 5731 - RNA, 20 nt, synthetic construct
  source 1..20: mol_type = other RNA
gggccccttacgttcccctc

SEQ ID NO: 5732 - RNA, 20 nt, synthetic construct
  source 1..20: mol_type = other RNA
gggctgggaagccggctctg

SEQ ID NO: 5733 - RNA, 20 nt, synthetic construct
  source 1..20: mol_type = other RNA
ggggaacgtaaggggccctg

SEQ ID NO: 5734 - RNA, 20 nt, synthetic construct
  source 1..20: mol_type = other RNA
ggggaagggagaagggtggg

SEQ ID NO: 5735 - RNA, 20 nt, synthetic construct
  source 1..20: mol_type = other RNA
ggggatggtgggctgggaag

SEQ ID NO: 5736 - RNA, 20 nt, synthetic construct
  source 1..20: mol_type = other RNA
gggggtcagggccccttacg

SEQ ID NO: 5737 - RNA, 20 nt, synthetic construct
  source 1..20: mol_type = other RNA
ggggtcagggccccttacgt

SEQ ID NO: 5738 - RNA, 20 nt, synthetic construct
  source 1..20: mol_type = other RNA
gggtcagggccccttacgtt

SEQ ID NO: 5739 - RNA, 20 nt, synthetic construct
  source 1..20: mol_type = other RNA
ggtcagggccccttacgttc

SEQ ID NO: 5740 - RNA, 20 nt, synthetic construct
  source 1..20: mol_type = other RNA
ggtctctggagctgtggttg

SEQ ID NO: 5741 - RNA, 20 nt, synthetic construct
  source 1..20: mol_type = other RNA
ggtgggctgggaagccggct

SEQ ID NO: 5742 - RNA, 20 nt, synthetic construct
  source 1..20: mol_type = other RNA
ggtggggaagggagaagggt

SEQ ID NO: 5743 - RNA, 20 nt, synthetic construct
  source 1..20: mol_type = other RNA
ggttctccttggatctgtgg

SEQ ID NO: 5744 - RNA, 20 nt, synthetic construct
  source 1..20: mol_type = other RNA
ggttgctgctgtgatatgga

SEQ ID NO: 5745 - RNA, 20 nt, synthetic construct
  source 1..20: mol_type = other RNA
gtaaggggccctgaccccca

SEQ ID NO: 5746 - RNA, 20 nt, synthetic construct
  source 1..20: mol_type = other RNA
gtcagggccccttacgttcc

SEQ ID NO: 5747 - RNA, 20 nt, synthetic construct
  source 1..20: mol_type = other RNA
gtctctggagctgtggttgc

SEQ ID NO: 5748 - RNA, 20 nt, synthetic construct
  source 1..20: mol_type = other RNA
gtgatatggaggaagaagag

SEQ ID NO: 5749 - RNA, 20 nt, synthetic construct
  source 1..20: mol_type = other RNA
gtgggctgggaagccggctc

SEQ ID NO: 5750 - RNA, 20 nt, synthetic construct
  source 1..20: mol_type = other RNA
gtggggaagggagaagggtg

SEQ ID NO: 5751 - RNA, 20 nt, synthetic construct
  source 1..20: mol_type = other RNA
gtggtctctggagctgtggt

SEQ ID NO: 5752 - RNA, 20 nt, synthetic construct
  source 1..20: mol_type = other RNA
gtggttgctgctgtgatatg

SEQ ID NO: 5753 - RNA, 20 nt, synthetic construct
  source 1..20: mol_type = other RNA
gttcccctcttttcccagag

SEQ ID NO: 5754 - RNA, 20 nt, synthetic construct
  source 1..20: mol_type = other RNA
gttctccttggatctgtggt

SEQ ID NO: 5755 - RNA, 20 nt, synthetic construct
  source 1..20: mol_type = other RNA
gttgctgctgtgatatggag

SEQ ID NO: 5756 - RNA, 20 nt, synthetic construct
  source 1..20: mol_type = other RNA
taaggggccctgacccccag

SEQ ID NO: 5757 - RNA, 20 nt, synthetic construct
  source 1..20: mol_type = other RNA
tacgttcccctcttttccca

SEQ ID NO: 5758 - RNA, 20 nt, synthetic construct
  source 1..20: mol_type = other RNA
tatcacagcagcaaccacag

SEQ ID NO: 5759 - RNA, 20 nt, synthetic construct
  source 1..20: mol_type = other RNA
tatggaggaagaagagctca

SEQ ID NO: 5760 - RNA, 20 nt, synthetic construct
  source 1..20: mol_type = other RNA
tcacagcagcaaccacagct

SEQ ID NO: 5761 - RNA, 20 nt, synthetic construct
  source 1..20: mol_type = other RNA
tcagaccccacccttctccc

SEQ ID NO: 5762 - RNA, 20 nt, synthetic construct
  source 1..20: mol_type = other RNA
tcagccctgaccctgcggaa

SEQ ID NO: 5763 - RNA, 20 nt, synthetic construct
  source 1..20: mol_type = other RNA
tcagggccccttacgttccc

SEQ ID NO: 5764 - RNA, 20 nt, synthetic construct
  source 1..20: mol_type = other RNA
tcaggtggggaagggagaag

SEQ ID NO: 5765 - RNA, 20 nt, synthetic construct
  source 1..20: mol_type = other RNA
tcattgctggcctggttctc

SEQ ID NO: 5766 - RNA, 20 nt, synthetic construct
  source 1..20: mol_type = other RNA
tccagagaccacagatccaa

SEQ ID NO: 5767 - RNA, 20 nt, synthetic construct
  source 1..20: mol_type = other RNA
tccatatcacagcagcaacc

SEQ ID NO: 5768 - RNA, 20 nt, synthetic construct
  source 1..20: mol_type = other RNA
tcccagagccggcttcccag

SEQ ID NO: 5769 - RNA, 20 nt, synthetic construct
  source 1..20: mol_type = other RNA
tccccacctgagctcttctt

SEQ ID NO: 5770 - RNA, 20 nt, synthetic construct
  source 1..20: mol_type = other RNA
tcccctcttttcccagagcc

SEQ ID NO: 5771 - RNA, 20 nt, synthetic construct
  source 1..20: mol_type = other RNA
tcccttccccacctgagctc

SEQ ID NO: 5772 - RNA, 20 nt, synthetic construct
  source 1..20: mol_type = other RNA
tccgcagggtcagggctgag

SEQ ID NO: 5773 - RNA, 20 nt, synthetic construct
  source 1..20: mol_type = other RNA
tcctccatatcacagcagca

SEQ ID NO: 5774 - RNA, 20 nt, synthetic construct
  source 1..20: mol_type = other RNA
tccttggatctgtggtctct

SEQ ID NO: 5775 - RNA, 20 nt, synthetic construct
  source 1..20: mol_type = other RNA
tctcccttccccacctgagc

SEQ ID NO: 5776 - RNA, 20 nt, synthetic construct
  source 1..20: mol_type = other RNA
tctccttggatctgtggtct

SEQ ID NO: 5777 - RNA, 20 nt, synthetic construct
  source 1..20: mol_type = other RNA
tctctggagctgtggttgct

SEQ ID NO: 5778 - RNA, 20 nt, synthetic construct
  source 1..20: mol_type = other RNA
tctggagctgtggttgctgc

SEQ ID NO: 5779 - RNA, 20 nt, synthetic construct
  source 1..20: mol_type = other RNA
tctgggaaaagaggggaacg

SEQ ID NO: 5780 - RNA, 20 nt, synthetic construct
  source 1..20: mol_type = other RNA
tctgtggtctctggagctgt

SEQ ID NO: 5781 - RNA, 20 nt, synthetic construct
  source 1..20: mol_type = other RNA
tcttcctccatatcacagca

SEQ ID NO: 5782 - RNA, 20 nt, synthetic construct
  source 1..20: mol_type = other RNA
tcttcttcctccatatcaca

SEQ ID NO: 5783 - RNA, 20 nt, synthetic construct
  source 1..20: mol_type = other RNA
tcttttcccagagccggctt

SEQ ID NO: 5784 - RNA, 20 nt, synthetic construct
  source 1..20: mol_type = other RNA
tgagctcttcttcctccata

SEQ ID NO: 5785 - RNA, 20 nt, synthetic construct
  source 1..20: mol_type = other RNA
tgaggcctgggggtcagggc

SEQ ID NO: 5786 - RNA, 20 nt, synthetic construct
  source 1..20: mol_type = other RNA
tgatatggaggaagaagagc

SEQ ID NO: 5787 - RNA, 20 nt, synthetic construct
  source 1..20: mol_type = other RNA
tgctgctgtgatatggagga

SEQ ID NO: 5788 - RNA, 20 nt, synthetic construct
  source 1..20: mol_type = other RNA
tgctggcctggttctccttg

SEQ ID NO: 5789 - RNA, 20 nt, synthetic construct
  source 1..20: mol_type = other RNA
tgctgtgatatggaggaaga

SEQ ID NO: 5790 - RNA, 20 nt, synthetic construct
  source 1..20: mol_type = other RNA
tggagcccttccgcagggtc

SEQ ID NO: 5791 - RNA, 20 nt, synthetic construct
  source 1..20: mol_type = other RNA
tggagctgtggttgctgctg

SEQ ID NO: 5792 - RNA, 20 nt, synthetic construct
  source 1..20: mol_type = other RNA
tggatctgtggtctctggag

SEQ ID NO: 5793 - RNA, 20 nt, synthetic construct
  source 1..20: mol_type = other RNA
tggcctggttctccttggat

SEQ ID NO: 5794 - RNA, 20 nt, synthetic construct
  source 1..20: mol_type = other RNA
tgggaaaagaggggaacgta

SEQ ID NO: 5795 - RNA, 20 nt, synthetic construct
  source 1..20: mol_type = other RNA
tgggaagccggctctgggaa

SEQ ID NO: 5796 - RNA, 20 nt, synthetic construct
  source 1..20: mol_type = other RNA
tgggctgggaagccggctct

SEQ ID NO: 5797 - RNA, 20 nt, synthetic construct
  source 1..20: mol_type = other RNA
tggggaagggagaagggtgg

SEQ ID NO: 5798 - RNA, 20 nt, synthetic construct
  source 1..20: mol_type = other RNA
tggggatggtgggctgggaa

SEQ ID NO: 5799 - RNA, 20 nt, synthetic construct
  source 1..20: mol_type = other RNA
tgggggtcagggccccttac

SEQ ID NO: 5800 - RNA, 20 nt, synthetic construct
  source 1..20: mol_type = other RNA
tggtctctggagctgtggtt

SEQ ID NO: 5801 - RNA, 20 nt, synthetic construct
  source 1..20: mol_type = other RNA
tggtgggctgggaagccggc

SEQ ID NO: 5802 - RNA, 20 nt, synthetic construct
  source 1..20: mol_type = other RNA
tggttctccttggatctgtg

SEQ ID NO: 5803 - RNA, 20 nt, synthetic construct
  source 1..20: mol_type = other RNA
tggttgctgctgtgatatgg

SEQ ID NO: 5804 - RNA, 20 nt, synthetic construct
  source 1..20: mol_type = other RNA
tgtgatatggaggaagaaga

SEQ ID NO: 5805 - RNA, 20 nt, synthetic construct
  source 1..20: mol_type = other RNA
tgtggtctctggagctgtgg

SEQ ID NO: 5806 - RNA, 20 nt, synthetic construct
  source 1..20: mol_type = other RNA
tgtggttgctgctgtgatat

SEQ ID NO: 5807 - RNA, 20 nt, synthetic construct
  source 1..20: mol_type = other RNA
ttacgttcccctcttttccc

SEQ ID NO: 5808 - RNA, 20 nt, synthetic construct
  source 1..20: mol_type = other RNA
ttcccagagccggcttccca

SEQ ID NO: 5809 - RNA, 20 nt, synthetic construct
  source 1..20: mol_type = other RNA
ttccccacctgagctcttct

SEQ ID NO: 5810 - RNA, 20 nt, synthetic construct
  source 1..20: mol_type = other RNA
ttcccctcttttcccagagc

SEQ ID NO: 5811 - RNA, 20 nt, synthetic construct
  source 1..20: mol_type = other RNA
ttccgcagggtcagggctga

SEQ ID NO: 5812 - RNA, 20 nt, synthetic construct
  source 1..20: mol_type = other RNA
ttcctccatatcacagcagc

SEQ ID NO: 5813 - RNA, 20 nt, synthetic construct
  source 1..20: mol_type = other RNA
ttctcccttccccacctgag

SEQ ID NO: 5814 - RNA, 20 nt, synthetic construct
  source 1..20: mol_type = other RNA
ttctccttggatctgtggtc

SEQ ID NO: 5815 - RNA, 20 nt, synthetic construct
  source 1..20: mol_type = other RNA
ttcttcctccatatcacagc

SEQ ID NO: 5816 - RNA, 20 nt, synthetic construct
  source 1..20: mol_type = other RNA
ttgctgctgtgatatggagg

SEQ ID NO: 5817 - RNA, 20 nt, synthetic construct
  source 1..20: mol_type = other RNA
ttgctggcctggttctcctt

SEQ ID NO: 5818 - RNA, 20 nt, synthetic construct
  source 1..20: mol_type = other RNA
ttggatctgtggtctctgga

SEQ ID NO: 5819 - RNA, 20 nt, synthetic construct
  source 1..20: mol_type = other RNA
tttcccagagccggcttccc

SEQ ID NO: 5820 - RNA, 20 nt, synthetic construct
  source 1..20: mol_type = other RNA
ttttcccagagccggcttcc

SEQ ID NO: 5821 - RNA, 21 nt, synthetic construct
  source 1..21: mol_type = other RNA
aaaactcagaccccacccttc

SEQ ID NO: 5822 - RNA, 21 nt, synthetic construct
  source 1..21: mol_type = other RNA
aaaagaggggaacgtaagggg

SEQ ID NO: 5823 - RNA, 21 nt, synthetic construct
  source 1..21: mol_type = other RNA
aaactcagaccccacccttct

SEQ ID NO: 5824 - RNA, 21 nt, synthetic construct
  source 1..21: mol_type = other RNA
aaagaggggaacgtaaggggc

SEQ ID NO: 5825 - RNA, 21 nt, synthetic construct
  source 1..21: mol_type = other RNA
aaccacagctccagagaccac

SEQ ID NO: 5826 - RNA, 21 nt, synthetic construct
  source 1..21: mol_type = other RNA
aacgtaaggggccctgacccc

SEQ ID NO: 5827 - RNA, 21 nt, synthetic construct
  source 1..21: mol_type = other RNA
aactcagaccccacccttctc

SEQ ID NO: 5828 - RNA, 21 nt, synthetic construct
  source 1..21: mol_type = other RNA
aagaaaactcagaccccaccc

SEQ ID NO: 5829 - RNA, 21 nt, synthetic construct
  source 1..21: mol_type = other RNA
aagaagagctcaggtggggaa

SEQ ID NO: 5830 - RNA, 21 nt, synthetic construct
  source 1..21: mol_type = other RNA
aagagctcaggtggggaaggg

SEQ ID NO: 5831 - RNA, 21 nt, synthetic construct
  source 1..21: mol_type = other RNA
aagaggggaacgtaaggggcc

SEQ ID NO: 5832 - RNA, 21 nt, synthetic construct
  source 1..21: mol_type = other RNA
aagccggctctgggaaaagag

SEQ ID NO: 5833 - RNA, 21 nt, synthetic construct
  source 1..21: mol_type = other RNA
aagggagaagggtggggtctg

SEQ ID NO: 5834 - RNA, 21 nt, synthetic construct
  source 1..21: mol_type = other RNA
aaggggccctgacccccaggc

SEQ ID NO: 5835 - RNA, 21 nt, synthetic construct
  source 1..21: mol_type = other RNA
acaagaaaactcagaccccac

SEQ ID NO: 5836 - RNA, 21 nt, synthetic construct
  source 1..21: mol_type = other RNA
acagatccaaggagaaccagg

SEQ ID NO: 5837 - RNA, 21 nt, synthetic construct
  source 1..21: mol_type = other RNA
acagcagcaaccacagctcca

SEQ ID NO: 5838 - RNA, 21 nt, synthetic construct
  source 1..21: mol_type = other RNA
acagctccagagaccacagat

SEQ ID NO: 5839 - RNA, 21 nt, synthetic construct
  source 1..21: mol_type = other RNA
accacagatccaaggagaacc

SEQ ID NO: 5840 - RNA, 21 nt, synthetic construct
  source 1..21: mol_type = other RNA
accacagctccagagaccaca

SEQ ID NO: 5841 - RNA, 21 nt, synthetic construct
  source 1..21: mol_type = other RNA
accccacccttctcccttccc

SEQ ID NO: 5842 - RNA, 21 nt, synthetic construct
  source 1..21: mol_type = other RNA
acccccaggcctcagccctga

SEQ ID NO: 5843 - RNA, 21 nt, synthetic construct
  source 1..21: mol_type = other RNA
acccttctcccttccccacct

SEQ ID NO: 5844 - RNA, 21 nt, synthetic construct
  source 1..21: mol_type = other RNA
acctgagctcttcttcctcca

SEQ ID NO: 5845 - RNA, 21 nt, synthetic construct
  source 1..21: mol_type = other RNA
acgatggggatggtgggctgg

SEQ ID NO: 5846 - RNA, 21 nt, synthetic construct
  source 1..21: mol_type = other RNA
acgtaaggggccctgaccccc

SEQ ID NO: 5847 - RNA, 21 nt, synthetic construct
  source 1..21: mol_type = other RNA
acgttcccctcttttcccaga

SEQ ID NO: 5848 - RNA, 21 nt, synthetic construct
  source 1..21: mol_type = other RNA
actcagaccccacccttctcc

SEQ ID NO: 5849 - RNA, 21 nt, synthetic construct
  source 1..21: mol_type = other RNA
agaaaactcagaccccaccct

SEQ ID NO: 5850 - RNA, 21 nt, synthetic construct
  source 1..21: mol_type = other RNA
agaagagctcaggtggggaag

SEQ ID NO: 5851 - RNA, 21 nt, synthetic construct
  source 1..21: mol_type = other RNA
agaccacagatccaaggagaa

SEQ ID NO: 5852 - RNA, 21 nt, synthetic construct
  source 1..21: mol_type = other RNA
agaccccacccttctcccttc

SEQ ID NO: 5853 - RNA, 21 nt, synthetic construct
  source 1..21: mol_type = other RNA
agagaccacagatccaaggag

SEQ ID NO: 5854 - RNA, 21 nt, synthetic construct
  source 1..21: mol_type = other RNA
agagccggcttcccagcccac

SEQ ID NO: 5855 - RNA, 21 nt, synthetic construct
  source 1..21: mol_type = other RNA
agagctcaggtggggaaggga

SEQ ID NO: 5856 - RNA, 21 nt, synthetic construct
  source 1..21: mol_type = other RNA
agaggggaacgtaaggggccc

SEQ ID NO: 5857 - RNA, 21 nt, synthetic construct
  source 1..21: mol_type = other RNA
agatccaaggagaaccaggcc

SEQ ID NO: 5858 - RNA, 21 nt, synthetic construct
  source 1..21: mol_type = other RNA
agcaaccacagctccagagac

SEQ ID NO: 5859 - RNA, 21 nt, synthetic construct
  source 1..21: mol_type = other RNA
agcagcaaccacagctccaga

SEQ ID NO: 5860 - RNA, 21 nt, synthetic construct
  source 1..21: mol_type = other RNA
agcccttccgcagggtcaggg

SEQ ID NO: 5861 - RNA, 21 nt, synthetic construct
  source 1..21: mol_type = other RNA
agccggctctgggaaaagagg

SEQ ID NO: 5862 - RNA, 21 nt, synthetic construct
  source 1..21: mol_type = other RNA
agccggcttcccagcccacca

SEQ ID NO: 5863 - RNA, 21 nt, synthetic construct
  source 1..21: mol_type = other RNA
agctcaggtggggaagggaga

SEQ ID NO: 5864 - RNA, 21 nt, synthetic construct
  source 1..21: mol_type = other RNA
agctccagagaccacagatcc

SEQ ID NO: 5865 - RNA, 21 nt, synthetic construct
  source 1..21: mol_type = other RNA
agctcttcttcctccatatca

SEQ ID NO: 5866 - RNA, 21 nt, synthetic construct
  source 1..21: mol_type = other RNA
agctgtggttgctgctgtgat

SEQ ID NO: 5867 - RNA, 21 nt, synthetic construct
  source 1..21: mol_type = other RNA
aggaagaagagctcaggtggg

SEQ ID NO: 5868 - RNA, 21 nt, synthetic construct
  source 1..21: mol_type = other RNA
aggcctcagccctgaccctgc

SEQ ID NO: 5869 - RNA, 21 nt, synthetic construct
  source 1..21: mol_type = other RNA
agggagaagggtggggtctga

SEQ ID NO: 5870 - RNA, 21 nt, synthetic construct
  source 1..21: mol_type = other RNA
agggccccttacgttcccctc

SEQ ID NO: 5871 - RNA, 21 nt, synthetic construct
  source 1..21: mol_type = other RNA
aggggaacgtaaggggccctg

SEQ ID NO: 5872 - RNA, 21 nt, synthetic construct
  source 1..21: mol_type = other RNA
aggtggggaagggagaagggt

SEQ ID NO: 5873 - RNA, 21 nt, synthetic construct
  source 1..21: mol_type = other RNA
atatcacagcagcaaccacag

SEQ ID NO: 5874 - RNA, 21 nt, synthetic construct
  source 1..21: mol_type = other RNA
atatggaggaagaagagctca

SEQ ID NO: 5875 - RNA, 21 nt, synthetic construct
  source 1..21: mol_type = other RNA
atcacagcagcaaccacagct

SEQ ID NO: 5876 - RNA, 21 nt, synthetic construct
  source 1..21: mol_type = other RNA
atcattgctggcctggttctc

SEQ ID NO: 5877 - RNA, 21 nt, synthetic construct
  source 1..21: mol_type = other RNA
atccaaggagaaccaggccag

SEQ ID NO: 5878 - RNA, 21 nt, synthetic construct
  source 1..21: mol_type = other RNA
atctgtggtctctggagctgt

SEQ ID NO: 5879 - RNA, 21 nt, synthetic construct
  source 1..21: mol_type = other RNA
atggaggaagaagagctcagg

SEQ ID NO: 5880 - RNA, 21 nt, synthetic construct
  source 1..21: mol_type = other RNA
atggggatggtgggctgggaa

SEQ ID NO: 5881 - RNA, 21 nt, synthetic construct
  source 1..21: mol_type = other RNA
atggtgggctgggaagccggc

SEQ ID NO: 5882 - RNA, 21 nt, synthetic construct
  source 1..21: mol_type = other RNA
attgctggcctggttctcctt

SEQ ID NO: 5883 - RNA, 21 nt, synthetic construct
  source 1..21: mol_type = other RNA
caaccacagctccagagacca

SEQ ID NO: 5884 - RNA, 21 nt, synthetic construct
  source 1..21: mol_type = other RNA
caagaaaactcagaccccacc

SEQ ID NO: 5885 - RNA, 21 nt, synthetic construct
  source 1..21: mol_type = other RNA
cacagatccaaggagaaccag

SEQ ID NO: 5886 - RNA, 21 nt, synthetic construct
  source 1..21: mol_type = other RNA
cacagcagcaaccacagctcc

SEQ ID NO: 5887 - RNA, 21 nt, synthetic construct
  source 1..21: mol_type = other RNA
cacagctccagagaccacaga

SEQ ID NO: 5888 - RNA, 21 nt, synthetic construct
  source 1..21: mol_type = other RNA
cacccttctcccttccccacc

SEQ ID NO: 5889 - RNA, 21 nt, synthetic construct
  source 1..21: mol_type = other RNA
cacctgagctcttcttcctcc

SEQ ID NO: 5890 - RNA, 21 nt, synthetic construct
  source 1..21: mol_type = other RNA
cacgatggggatggtgggctg

SEQ ID NO: 5891 - RNA, 21 nt, synthetic construct
  source 1..21: mol_type = other RNA
cagaccccacccttctccctt

SEQ ID NO: 5892 - RNA, 21 nt, synthetic construct
  source 1..21: mol_type = other RNA
cagagaccacagatccaagga

SEQ ID NO: 5893 - RNA, 21 nt, synthetic construct
  source 1..21: mol_type = other RNA
cagagccggcttcccagccca

SEQ ID NO: 5894 - RNA, 21 nt, synthetic construct
  source 1..21: mol_type = other RNA
cagatccaaggagaaccaggc

SEQ ID NO: 5895 - RNA, 21 nt, synthetic construct
  source 1..21: mol_type = other RNA
cagcaaccacagctccagaga

SEQ ID NO: 5896 - RNA, 21 nt, synthetic construct
  source 1..21: mol_type = other RNA
cagcagcaaccacagctccag

SEQ ID NO: 5897 - RNA, 21 nt, synthetic construct
  source 1..21: mol_type = other RNA
cagctccagagaccacagatc

SEQ ID NO: 5898 - RNA, 21 nt, synthetic construct
  source 1..21: mol_type = other RNA
caggcctcagccctgaccctg

SEQ ID NO: 5899 - RNA, 21 nt, synthetic construct
  source 1..21: mol_type = other RNA
cagggccccttacgttcccct

SEQ ID NO: 5900 - RNA, 21 nt, synthetic construct
  source 1..21: mol_type = other RNA
caggtggggaagggagaaggg

SEQ ID NO: 5901 - RNA, 21 nt, synthetic construct
  source 1..21: mol_type = other RNA
catatcacagcagcaaccaca

SEQ ID NO: 5902 - RNA, 21 nt, synthetic construct
  source 1..21: mol_type = other RNA
catcattgctggcctggttct

SEQ ID NO: 5903 - RNA, 21 nt, synthetic construct
  source 1..21: mol_type = other RNA
cattgctggcctggttctcct

SEQ ID NO: 5904 - RNA, 21 nt, synthetic construct
  source 1..21: mol_type = other RNA
ccacagatccaaggagaacca

SEQ ID NO: 5905 - RNA, 21 nt, synthetic construct
  source 1..21: mol_type = other RNA
ccacagctccagagaccacag

SEQ ID NO: 5906 - RNA, 21 nt, synthetic construct
  source 1..21: mol_type = other RNA
ccacccttctcccttccccac

SEQ ID NO: 5907 - RNA, 21 nt, synthetic construct
  source 1..21: mol_type = other RNA
ccacctgagctcttcttcctc

SEQ ID NO: 5908 - RNA, 21 nt, synthetic construct
  source 1..21: mol_type = other RNA
ccacgatggggatggtgggct

SEQ ID NO: 5909 - RNA, 21 nt, synthetic construct
  source 1..21: mol_type = other RNA
ccagagaccacagatccaagg

SEQ ID NO: 5910 - RNA, 21 nt, synthetic construct
  source 1..21: mol_type = other RNA
ccagagccggcttcccagccc

SEQ ID NO: 5911 - RNA, 21 nt, synthetic construct
  source 1..21: mol_type = other RNA
ccaggcctcagccctgaccct

SEQ ID NO: 5912 - RNA, 21 nt, synthetic construct
  source 1..21: mol_type = other RNA
ccatatcacagcagcaaccac

SEQ ID NO: 5913 - RNA, 21 nt, synthetic construct
  source 1..21: mol_type = other RNA
cccacccttctcccttcccca

SEQ ID NO: 5914 - RNA, 21 nt, synthetic construct
  source 1..21: mol_type = other RNA
cccacctgagctcttcttcct

SEQ ID NO: 5915 - RNA, 21 nt, synthetic construct
  source 1..21: mol_type = other RNA
cccacgatggggatggtgggc

SEQ ID NO: 5916 - RNA, 21 nt, synthetic construct
  source 1..21: mol_type = other RNA
cccagagccggcttcccagcc

SEQ ID NO: 5917 - RNA, 21 nt, synthetic construct
  source 1..21: mol_type = other RNA
cccaggcctcagccctgaccc

SEQ ID NO: 5918 - RNA, 21 nt, synthetic construct
  source 1..21: mol_type = other RNA
ccccacccttctcccttcccc

SEQ ID NO: 5919 - RNA, 21 nt, synthetic construct
  source 1..21: mol_type = other RNA
ccccacctgagctcttcttcc

SEQ ID NO: 5920 - RNA, 21 nt, synthetic construct
  source 1..21: mol_type = other RNA
ccccaggcctcagccctgacc

SEQ ID NO: 5921 - RNA, 21 nt, synthetic construct
  source 1..21: mol_type = other RNA
cccccaggcctcagccctgac

SEQ ID NO: 5922 - RNA, 21 nt, synthetic construct
  source 1..21: mol_type = other RNA
cccctcttttcccagagccgg

SEQ ID NO: 5923 - RNA, 21 nt, synthetic construct
  source 1..21: mol_type = other RNA
ccccttacgttcccctctttt

SEQ ID NO: 5924 - RNA, 21 nt, synthetic construct
  source 1..21: mol_type = other RNA
ccctcttttcccagagccggc

SEQ ID NO: 5925 - RNA, 21 nt, synthetic construct
  source 1..21: mol_type = other RNA
cccttacgttcccctcttttc

SEQ ID NO: 5926 - RNA, 21 nt, synthetic construct
  source 1..21: mol_type = other RNA
cccttccgcagggtcagggct

SEQ ID NO: 5927 - RNA, 21 nt, synthetic construct
  source 1..21: mol_type = other RNA
cccttctcccttccccacctg

SEQ ID NO: 5928 - RNA, 21 nt, synthetic construct
  source 1..21: mol_type = other RNA
ccgcagggtcagggctgaggc

SEQ ID NO: 5929 - RNA, 21 nt, synthetic construct
  source 1..21: mol_type = other RNA
ccggctctgggaaaagagggg

SEQ ID NO: 5930 - RNA, 21 nt, synthetic construct
  source 1..21: mol_type = other RNA
ccggcttcccagcccaccatc

SEQ ID NO: 5931 - RNA, 21 nt, synthetic construct
  source 1..21: mol_type = other RNA
cctcagccctgaccctgcgga

SEQ ID NO: 5932 - RNA, 21 nt, synthetic construct
  source 1..21: mol_type = other RNA
cctccatatcacagcagcaac

SEQ ID NO: 5933 - RNA, 21 nt, synthetic construct
  source 1..21: mol_type = other RNA
cctcttttcccagagccggct

SEQ ID NO: 5934 - RNA, 21 nt, synthetic construct
  source 1..21: mol_type = other RNA
cctgagctcttcttcctccat

SEQ ID NO: 5935 - RNA, 21 nt, synthetic construct
  source 1..21: mol_type = other RNA
cctgggggtcagggcccctta

SEQ ID NO: 5936 - RNA, 21 nt, synthetic construct
  source 1..21: mol_type = other RNA
cctggttctccttggatctgt

SEQ ID NO: 5937 - RNA, 21 nt, synthetic construct
  source 1..21: mol_type = other RNA
ccttacgttcccctcttttcc

SEQ ID NO: 5938 - RNA, 21 nt, synthetic construct
  source 1..21: mol_type = other RNA
ccttccgcagggtcagggctg

SEQ ID NO: 5939 - RNA, 21 nt, synthetic construct
  source 1..21: mol_type = other RNA
ccttctcccttccccacctga

SEQ ID NO: 5940 - RNA, 21 nt, synthetic construct
  source 1..21: mol_type = other RNA
ccttggatctgtggtctctgg

SEQ ID NO: 5941 - RNA, 21 nt, synthetic construct
  source 1..21: mol_type = other RNA
cgatggggatggtgggctggg

SEQ ID NO: 5942 - RNA, 21 nt, synthetic construct
  source 1..21: mol_type = other RNA
cgcagggtcagggctgaggcc

SEQ ID NO: 5943 - RNA, 21 nt, synthetic construct
  source 1..21: mol_type = other RNA
cggctctgggaaaagagggga

SEQ ID NO: 5944 - RNA, 21 nt, synthetic construct
  source 1..21: mol_type = other RNA
cggcttcccagcccaccatcc

SEQ ID NO: 5945 - RNA, 21 nt, synthetic construct
  source 1..21: mol_type = other RNA
cgtaaggggccctgaccccca

SEQ ID NO: 5946 - RNA, 21 nt, synthetic construct
  source 1..21: mol_type = other RNA
cgttcccctcttttcccagag

SEQ ID NO: 5947 - RNA, 21 nt, synthetic construct
  source 1..21: mol_type = other RNA
ctcagaccccacccttctccc

SEQ ID NO: 5948 - RNA, 21 nt, synthetic construct
  source 1..21: mol_type = other RNA
ctcagccctgaccctgcggaa

SEQ ID NO: 5949 - RNA, 21 nt, synthetic construct
  source 1..21: mol_type = other RNA
ctcaggtggggaagggagaag

SEQ ID NO: 5950 - RNA, 21 nt, synthetic construct
  source 1..21: mol_type = other RNA
ctccagagaccacagatccaa

SEQ ID NO: 5951 - RNA, 21 nt, synthetic construct
  source 1..21: mol_type = other RNA
ctccatatcacagcagcaacc

SEQ ID NO: 5952 - RNA, 21 nt, synthetic construct
  source 1..21: mol_type = other RNA
ctcccttccccacctgagctc

SEQ ID NO: 5953 - RNA, 21 nt, synthetic construct
  source 1..21: mol_type = other RNA
ctccttggatctgtggtctct

SEQ ID NO: 5954 - RNA, 21 nt, synthetic construct
  source 1..21: mol_type = other RNA
ctctggagctgtggttgctgc

SEQ ID NO: 5955 - RNA, 21 nt, synthetic construct
  source 1..21: mol_type = other RNA
ctctgggaaaagaggggaacg

SEQ ID NO: 5956 - RNA, 21 nt, synthetic construct
  source 1..21: mol_type = other RNA
ctcttcttcctccatatcaca

SEQ ID NO: 5957 - RNA, 21 nt, synthetic construct
  source 1..21: mol_type = other RNA
ctcttttcccagagccggctt

SEQ ID NO: 5958 - RNA, 21 nt, synthetic construct
  source 1..21: mol_type = other RNA
ctgagctcttcttcctccata

SEQ ID NO: 5959 - RNA, 21 nt, synthetic construct
  source 1..21: mol_type = other RNA
ctgaggcctgggggtcagggc

SEQ ID NO: 5960 - RNA, 21 nt, synthetic construct
  source 1..21: mol_type = other RNA
ctgctgtgatatggaggaaga

SEQ ID NO: 5961 - RNA, 21 nt, synthetic construct
  source 1..21: mol_type = other RNA
ctggagctgtggttgctgctg

SEQ ID NO: 5962 - RNA, 21 nt, synthetic construct
  source 1..21: mol_type = other RNA
ctggcctggttctccttggat

SEQ ID NO: 5963 - RNA, 21 nt, synthetic construct
  source 1..21: mol_type = other RNA
ctgggaaaagaggggaacgta

SEQ ID NO: 5964 - RNA, 21 nt, synthetic construct
  source 1..21: mol_type = other RNA
ctgggaagccggctctgggaa

SEQ ID NO: 5965 - RNA, 21 nt, synthetic construct
  source 1..21: mol_type = other RNA
ctgggggtcagggccccttac

SEQ ID NO: 5966 - RNA, 21 nt, synthetic construct
  source 1..21: mol_type = other RNA
ctggttctccttggatctgtg

SEQ ID NO: 5967 - RNA, 21 nt, synthetic construct
  source 1..21: mol_type = other RNA
ctgtgatatggaggaagaaga

SEQ ID NO: 5968 - RNA, 21 nt, synthetic construct
  source 1..21: mol_type = other RNA
ctgtggtctctggagctgtgg

SEQ ID NO: 5969 - RNA, 21 nt, synthetic construct
  source 1..21: mol_type = other RNA
ctgtggttgctgctgtgatat

SEQ ID NO: 5970 - RNA, 21 nt, synthetic construct
  source 1..21: mol_type = other RNA
cttacgttcccctcttttccc

SEQ ID NO: 5971 - RNA, 21 nt, synthetic construct
  source 1..21: mol_type = other RNA
cttccccacctgagctcttct

SEQ ID NO: 5972 - RNA, 21 nt, synthetic construct
  source 1..21: mol_type = other RNA
cttccgcagggtcagggctga

SEQ ID NO: 5973 - RNA, 21 nt, synthetic construct
  source 1..21: mol_type = other RNA
cttcctccatatcacagcagc

SEQ ID NO: 5974 - RNA, 21 nt, synthetic construct
  source 1..21: mol_type = other RNA
cttctcccttccccacctgag

SEQ ID NO: 5975 - RNA, 21 nt, synthetic construct
  source 1..21: mol_type = other RNA
cttcttcctccatatcacagc

SEQ ID NO: 5976 - RNA, 21 nt, synthetic construct
  source 1..21: mol_type = other RNA
cttggatctgtggtctctgga

SEQ ID NO: 5977 - RNA, 21 nt, synthetic construct
  source 1..21: mol_type = other RNA
cttttcccagagccggcttcc

SEQ ID NO: 5978 - RNA, 21 nt, synthetic construct
  source 1..21: mol_type = other RNA
gaaaactcagaccccaccctt

SEQ ID NO: 5979 - RNA, 21 nt, synthetic construct
  source 1..21: mol_type = other RNA
gaaaagaggggaacgtaaggg

SEQ ID NO: 5980 - RNA, 21 nt, synthetic construct
  source 1..21: mol_type = other RNA
gaacgtaaggggccctgaccc

SEQ ID NO: 5981 - RNA, 21 nt, synthetic construct
  source 1..21: mol_type = other RNA
gaagaagagctcaggtgggga

SEQ ID NO: 5982 - RNA, 21 nt, synthetic construct
  source 1..21: mol_type = other RNA
gaagagctcaggtggggaagg

SEQ ID NO: 5983 - RNA, 21 nt, synthetic construct
  source 1..21: mol_type = other RNA
gaagccggctctgggaaaaga

SEQ ID NO: 5984 - RNA, 21 nt, synthetic construct
  source 1..21: mol_type = other RNA
gaagggagaagggtggggtct

SEQ ID NO: 5985 - RNA, 21 nt, synthetic construct
  source 1..21: mol_type = other RNA
gaccacagatccaaggagaac

SEQ ID NO: 5986 - RNA, 21 nt, synthetic construct
  source 1..21: mol_type = other RNA
gaccccacccttctcccttcc

SEQ ID NO: 5987 - RNA, 21 nt, synthetic construct
  source 1..21: mol_type = other RNA
gacccccaggcctcagccctg

SEQ ID NO: 5988 - RNA, 21 nt, synthetic construct
  source 1..21: mol_type = other RNA
gagaccacagatccaaggaga

SEQ ID NO: 5989 - RNA, 21 nt, synthetic construct
  source 1..21: mol_type = other RNA
gagcccttccgcagggtcagg

SEQ ID NO: 5990 - RNA, 21 nt, synthetic construct
  source 1..21: mol_type = other RNA
gagccggcttcccagcccacc

SEQ ID NO: 5991 - RNA, 21 nt, synthetic construct
  source 1..21: mol_type = other RNA
gagctcaggtggggaagggag

SEQ ID NO: 5992 - RNA, 21 nt, synthetic construct
  source 1..21: mol_type = other RNA
gagctcttcttcctccatatc

SEQ ID NO: 5993 - RNA, 21 nt, synthetic construct
  source 1..21: mol_type = other RNA
gagctgtggttgctgctgtga

SEQ ID NO: 5994 - RNA, 21 nt, synthetic construct
  source 1..21: mol_type = other RNA
gaggaagaagagctcaggtgg

SEQ ID NO: 5995 - RNA, 21 nt, synthetic construct
  source 1..21: mol_type = other RNA
gaggggaacgtaaggggccct

SEQ ID NO: 5996 - RNA, 21 nt, synthetic construct
  source 1..21: mol_type = other RNA
gatatggaggaagaagagctc

SEQ ID NO: 5997 - RNA, 21 nt, synthetic construct
  source 1..21: mol_type = other RNA
gatccaaggagaaccaggcca

SEQ ID NO: 5998 - RNA, 21 nt, synthetic construct
  source 1..21: mol_type = other RNA
gatctgtggtctctggagctg

SEQ ID NO: 5999 - RNA, 21 nt, synthetic construct
  source 1..21: mol_type = other RNA
gatggggatggtgggctggga

SEQ ID NO: 6000 - RNA, 21 nt, synthetic construct
  source 1..21: mol_type = other RNA
gatggtgggctgggaagccgg

SEQ ID NO: 6001 - RNA, 21 nt, synthetic construct
  source 1..21: mol_type = other RNA
gcaaccacagctccagagacc

SEQ ID NO: 6002 - RNA, 21 nt, synthetic construct
  source 1..21: mol_type = other RNA
gcagcaaccacagctccagag

SEQ ID NO: 6003 - RNA, 21 nt, synthetic construct
  source 1..21: mol_type = other RNA
gccccttacgttcccctcttt

SEQ ID NO: 6004 - RNA, 21 nt, synthetic construct
  source 1..21: mol_type = other RNA
gcccttccgcagggtcagggc

SEQ ID NO: 6005 - RNA, 21 nt, synthetic construct
  source 1..21: mol_type = other RNA
gccggctctgggaaaagaggg

SEQ ID NO: 6006 - RNA, 21 nt, synthetic construct
  source 1..21: mol_type = other RNA
gccggcttcccagcccaccat

SEQ ID NO: 6007 - RNA, 21 nt, synthetic construct
  source 1..21: mol_type = other RNA
gcctcagccctgaccctgcgg

SEQ ID NO: 6008 - RNA, 21 nt, synthetic construct
  source 1..21: mol_type = other RNA
gcctgggggtcagggcccctt

SEQ ID NO: 6009 - RNA, 21 nt, synthetic construct
  source 1..21: mol_type = other RNA
gcctggttctccttggatctg

SEQ ID NO: 6010 - RNA, 21 nt, synthetic construct
  source 1..21: mol_type = other RNA
gctcaggtggggaagggagaa

SEQ ID NO: 6011 - RNA, 21 nt, synthetic construct
  source 1..21: mol_type = other RNA
gctccagagaccacagatcca

SEQ ID NO: 6012 - RNA, 21 nt, synthetic construct
  source 1..21: mol_type = other RNA
gctctgggaaaagaggggaac

SEQ ID NO: 6013 - RNA, 21 nt, synthetic construct
  source 1..21: mol_type = other RNA
gctcttcttcctccatatcac

SEQ ID NO: 6014 - RNA, 21 nt, synthetic construct
  source 1..21: mol_type = other RNA
gctgaggcctgggggtcaggg

SEQ ID NO: 6015 - RNA, 21 nt, synthetic construct
  source 1..21: mol_type = other RNA
gctgctgtgatatggaggaag

SEQ ID NO: 6016 - RNA, 21 nt, synthetic construct
  source 1..21: mol_type = other RNA
gctggcctggttctccttgga

SEQ ID NO: 6017 - RNA, 21 nt, synthetic construct
  source 1..21: mol_type = other RNA
gctgggaagccggctctggga

SEQ ID NO: 6018 - RNA, 21 nt, synthetic construct
  source 1..21: mol_type = other RNA
gctgtgatatggaggaagaag

SEQ ID NO: 6019 - RNA, 21 nt, synthetic construct
  source 1..21: mol_type = other RNA
gctgtggttgctgctgtgata

SEQ ID NO: 6020 - RNA, 21 nt, synthetic construct
  source 1..21: mol_type = other RNA
gcttcccagcccaccatcccc

SEQ ID NO: 6021 - RNA, 21 nt, synthetic construct
  source 1..21: mol_type = other RNA
ggaaaagaggggaacgtaagg

SEQ ID NO: 6022 - RNA, 21 nt, synthetic construct
  source 1..21: mol_type = other RNA
ggaacgtaaggggccctgacc

SEQ ID NO: 6023 - RNA, 21 nt, synthetic construct
  source 1..21: mol_type = other RNA
ggaagaagagctcaggtgggg

SEQ ID NO: 6024 - RNA, 21 nt, synthetic construct
  source 1..21: mol_type = other RNA
ggaagccggctctgggaaaag

SEQ ID NO: 6025 - RNA, 21 nt, synthetic construct
  source 1..21: mol_type = other RNA
ggaagggagaagggtggggtc

SEQ ID NO: 6026 - RNA, 21 nt, synthetic construct
  source 1..21: mol_type = other RNA
ggagaagggtggggtctgagt

SEQ ID NO: 6027 - RNA, 21 nt, synthetic construct
  source 1..21: mol_type = other RNA
ggagcccttccgcagggtcag

SEQ ID NO: 6028 - RNA, 21 nt, synthetic construct
  source 1..21: mol_type = other RNA
ggagctgtggttgctgctgtg

SEQ ID NO: 6029 - RNA, 21 nt, synthetic construct
  source 1..21: mol_type = other RNA
ggatctgtggtctctggagct

SEQ ID NO: 6030 - RNA, 21 nt, synthetic construct
  source 1..21: mol_type = other RNA
ggatggtgggctgggaagccg

SEQ ID NO: 6031 - RNA, 21 nt, synthetic construct
  source 1..21: mol_type = other RNA
ggccccttacgttcccctctt

SEQ ID NO: 6032 - RNA, 21 nt, synthetic construct
  source 1..21: mol_type = other RNA
ggcctcagccctgaccctgcg

SEQ ID NO: 6033 - RNA, 21 nt, synthetic construct
  source 1..21: mol_type = other RNA
ggcctggttctccttggatct

SEQ ID NO: 6034 - RNA, 21 nt, synthetic construct
  source 1..21: mol_type = other RNA
ggctctgggaaaagaggggaa

SEQ ID NO: 6035 - RNA, 21 nt, synthetic construct
  source 1..21: mol_type = other RNA
ggctgaggcctgggggtcagg

SEQ ID NO: 6036 - RNA, 21 nt, synthetic construct
  source 1..21: mol_type = other RNA
ggctgggaagccggctctggg

SEQ ID NO: 6037 - RNA, 21 nt, synthetic construct
  source 1..21: mol_type = other RNA
ggcttcccagcccaccatccc

SEQ ID NO: 6038 - RNA, 21 nt, synthetic construct
  source 1..21: mol_type = other RNA
gggaaaagaggggaacgtaag

SEQ ID NO: 6039 - RNA, 21 nt, synthetic construct
  source 1..21: mol_type = other RNA
gggaacgtaaggggccctgac

SEQ ID NO: 6040 - RNA, 21 nt, synthetic construct
  source 1..21: mol_type = other RNA
gggaagccggctctgggaaaa

SEQ ID NO: 6041 - RNA, 21 nt, synthetic construct
  source 1..21: mol_type = other RNA
gggaagggagaagggtggggt

SEQ ID NO: 6042 - RNA, 21 nt, synthetic construct
  source 1..21: mol_type = other RNA
gggagaagggtggggtctgag

SEQ ID NO: 6043 - RNA, 21 nt, synthetic construct
  source 1..21: mol_type = other RNA
gggatggtgggctgggaagcc

SEQ ID NO: 6044 - RNA, 21 nt, synthetic construct
  source 1..21: mol_type = other RNA
gggccccttacgttcccctct

SEQ ID NO: 6045 - RNA, 21 nt, synthetic construct
  source 1..21: mol_type = other RNA
gggctgaggcctgggggtcag

SEQ ID NO: 6046 - RNA, 21 nt, synthetic construct
  source 1..21: mol_type = other RNA
gggctgggaagccggctctgg

SEQ ID NO: 6047 - RNA, 21 nt, synthetic construct
  source 1..21: mol_type = other RNA
ggggaacgtaaggggccctga

SEQ ID NO: 6048 - RNA, 21 nt, synthetic construct
  source 1..21: mol_type = other RNA
ggggaagggagaagggtgggg

SEQ ID NO: 6049 - RNA, 21 nt, synthetic construct
  source 1..21: mol_type = other RNA
ggggatggtgggctgggaagc

SEQ ID NO: 6050 - RNA, 21 nt, synthetic construct
  source 1..21: mol_type = other RNA
gggggtcagggccccttacgt

SEQ ID NO: 6051 - RNA, 21 nt, synthetic construct
  source 1..21: mol_type = other RNA
ggggtcagggccccttacgtt

SEQ ID NO: 6052 - RNA, 21 nt, synthetic construct
  source 1..21: mol_type = other RNA
gggtcagggccccttacgttc

SEQ ID NO: 6053 - RNA, 21 nt, synthetic construct
  source 1..21: mol_type = other RNA
ggtcagggccccttacgttcc

SEQ ID NO: 6054 - RNA, 21 nt, synthetic construct
  source 1..21: mol_type = other RNA
ggtctctggagctgtggttgc

SEQ ID NO: 6055 - RNA, 21 nt, synthetic construct
  source 1..21: mol_type = other RNA
ggtgggctgggaagccggctc

SEQ ID NO: 6056 - RNA, 21 nt, synthetic construct
  source 1..21: mol_type = other RNA
ggtggggaagggagaagggtg

SEQ ID NO: 6057 - RNA, 21 nt, synthetic construct
  source 1..21: mol_type = other RNA
ggttctccttggatctgtggt

SEQ ID NO: 6058 - RNA, 21 nt, synthetic construct
  source 1..21: mol_type = other RNA
ggttgctgctgtgatatggag

SEQ ID NO: 6059 - RNA, 21 nt, synthetic construct
  source 1..21: mol_type = other RNA
gtaaggggccctgacccccag

SEQ ID NO: 6060 - RNA, 21 nt, synthetic construct
  source 1..21: mol_type = other RNA
gtcagggccccttacgttccc

SEQ ID NO: 6061 - RNA, 21 nt, synthetic construct
  source 1..21: mol_type = other RNA
gtctctggagctgtggttgct

SEQ ID NO: 6062 - RNA, 21 nt, synthetic construct
  source 1..21: mol_type = other RNA
gtgatatggaggaagaagagc

SEQ ID NO: 6063 - RNA, 21 nt, synthetic construct
  source 1..21: mol_type = other RNA
gtgggctgggaagccggctct

SEQ ID NO: 6064 - RNA, 21 nt, synthetic construct
  source 1..21: mol_type = other RNA
gtggggaagggagaagggtgg

SEQ ID NO: 6065 - RNA, 21 nt, synthetic construct
  source 1..21: mol_type = other RNA
gtggtctctggagctgtggtt

SEQ ID NO: 6066 - RNA, 21 nt, synthetic construct
  source 1..21: mol_type = other RNA
gtggttgctgctgtgatatgg

SEQ ID NO: 6067 - RNA, 21 nt, synthetic construct
  source 1..21: mol_type = other RNA
gttcccctcttttcccagagc

SEQ ID NO: 6068 - RNA, 21 nt, synthetic construct
  source 1..21: mol_type = other RNA
gttctccttggatctgtggtc

SEQ ID NO: 6069 - RNA, 21 nt, synthetic construct
  source 1..21: mol_type = other RNA
gttgctgctgtgatatggagg

SEQ ID NO: 6070 - RNA, 21 nt, synthetic construct
  source 1..21: mol_type = other RNA
taaggggccctgacccccagg

SEQ ID NO: 6071 - RNA, 21 nt, synthetic construct
  source 1..21: mol_type = other RNA
tacgttcccctcttttcccag

SEQ ID NO: 6072 - RNA, 21 nt, synthetic construct
  source 1..21: mol_type = other RNA
tatcacagcagcaaccacagc

SEQ ID NO: 6073 - RNA, 21 nt, synthetic construct
  source 1..21: mol_type = other RNA
tatggaggaagaagagctcag

SEQ ID NO: 6074 - RNA, 21 nt, synthetic construct
  source 1..21: mol_type = other RNA
tcacagcagcaaccacagctc

SEQ ID NO: 6075 - RNA, 21 nt, synthetic construct
  source 1..21: mol_type = other RNA
tcagaccccacccttctccct

SEQ ID NO: 6076 - RNA, 21 nt, synthetic construct
  source 1..21: mol_type = other RNA
tcagggccccttacgttcccc

SEQ ID NO: 6077 - RNA, 21 nt, synthetic construct
  source 1..21: mol_type = other RNA
tcaggtggggaagggagaagg

SEQ ID NO: 6078 - RNA, 21 nt, synthetic construct
  source 1..21: mol_type = other RNA
tcattgctggcctggttctcc

SEQ ID NO: 6079 - RNA, 21 nt, synthetic construct
  source 1..21: mol_type = other RNA
tccagagaccacagatccaag

SEQ ID NO: 6080 - RNA, 21 nt, synthetic construct
  source 1..21: mol_type = other RNA
tccatatcacagcagcaacca

SEQ ID NO: 6081 - RNA, 21 nt, synthetic construct
  source 1..21: mol_type = other RNA
tcccagagccggcttcccagc

SEQ ID NO: 6082 - RNA, 21 nt, synthetic construct
  source 1..21: mol_type = other RNA
tccccacctgagctcttcttc

SEQ ID NO: 6083 - RNA, 21 nt, synthetic construct
  source 1..21: mol_type = other RNA
tcccctcttttcccagagccg

SEQ ID NO: 6084 - RNA, 21 nt, synthetic construct
  source 1..21: mol_type = other RNA
tcccttccccacctgagctct

SEQ ID NO: 6085 - RNA, 21 nt, synthetic construct
  source 1..21: mol_type = other RNA
tccgcagggtcagggctgagg

SEQ ID NO: 6086 - RNA, 21 nt, synthetic construct
  source 1..21: mol_type = other RNA
tcctccatatcacagcagcaa

SEQ ID NO: 6087 - RNA, 21 nt, synthetic construct
  source 1..21: mol_type = other RNA
tccttggatctgtggtctctg

SEQ ID NO: 6088 - RNA, 21 nt, synthetic construct
  source 1..21: mol_type = other RNA
tctcccttccccacctgagct

SEQ ID NO: 6089 - RNA, 21 nt, synthetic construct
  source 1..21: mol_type = other RNA
tctccttggatctgtggtctc

SEQ ID NO: 6090 - RNA, 21 nt, synthetic construct
  source 1..21: mol_type = other RNA
tctctggagctgtggttgctg

SEQ ID NO: 6091 - RNA, 21 nt, synthetic construct
  source 1..21: mol_type = other RNA
tctggagctgtggttgctgct

SEQ ID NO: 6092 - RNA, 21 nt, synthetic construct
  source 1..21: mol_type = other RNA
tctgggaaaagaggggaacgt

SEQ ID NO: 6093 - RNA, 21 nt, synthetic construct
  source 1..21: mol_type = other RNA
tctgtggtctctggagctgtg

SEQ ID NO: 6094 - RNA, 21 nt, synthetic construct
  source 1..21: mol_type = other RNA
tcttcctccatatcacagcag

SEQ ID NO: 6095 - RNA, 21 nt, synthetic construct
  source 1..21: mol_type = other RNA
tcttcttcctccatatcacag

SEQ ID NO: 6096 - RNA, 21 nt, synthetic construct
  source 1..21: mol_type = other RNA
tcttttcccagagccggcttc

SEQ ID NO: 6097 - RNA, 21 nt, synthetic construct
  source 1..21: mol_type = other RNA
tgagctcttcttcctccatat

SEQ ID NO: 6098 - RNA, 21 nt, synthetic construct
  source 1..21: mol_type = other RNA
tgaggcctgggggtcagggcc

SEQ ID NO: 6099 - RNA, 21 nt, synthetic construct
  source 1..21: mol_type = other RNA
tgatatggaggaagaagagct

SEQ ID NO: 6100 - RNA, 21 nt, synthetic construct
  source 1..21: mol_type = other RNA
tgctgctgtgatatggaggaa

SEQ ID NO: 6101 - RNA, 21 nt, synthetic construct
  source 1..21: mol_type = other RNA
tgctggcctggttctccttgg

SEQ ID NO: 6102 - RNA, 21 nt, synthetic construct
  source 1..21: mol_type = other RNA
tgctgtgatatggaggaagaa

SEQ ID NO: 6103 - RNA, 21 nt, synthetic construct
  source 1..21: mol_type = other RNA
tggagcccttccgcagggtca

SEQ ID NO: 6104 - RNA, 21 nt, synthetic construct
  source 1..21: mol_type = other RNA
tggagctgtggttgctgctgt

SEQ ID NO: 6105 - RNA, 21 nt, synthetic construct
  source 1..21: mol_type = other RNA
tggatctgtggtctctggagc

SEQ ID NO: 6106 - RNA, 21 nt, synthetic construct
  source 1..21: mol_type = other RNA
tggcctggttctccttggatc

SEQ ID NO: 6107 - RNA, 21 nt, synthetic construct
  source 1..21: mol_type = other RNA
tgggaaaagaggggaacgtaa

SEQ ID NO: 6108 - RNA, 21 nt, synthetic construct
  source 1..21: mol_type = other RNA
tgggaagccggctctgggaaa

SEQ ID NO: 6109 - RNA, 21 nt, synthetic construct
  source 1..21: mol_type = other RNA
tgggctgggaagccggctctg

SEQ ID NO: 6110 - RNA, 21 nt, synthetic construct
  source 1..21: mol_type = other RNA
tggggaagggagaagggtggg

SEQ ID NO: 6111 - RNA, 21 nt, synthetic construct
  source 1..21: mol_type = other RNA
tggggatggtgggctgggaag

SEQ ID NO: 6112 - RNA, 21 nt, synthetic construct
  source 1..21: mol_type = other RNA
tgggggtcagggccccttacg

SEQ ID NO: 6113 - RNA, 21 nt, synthetic construct
  source 1..21: mol_type = other RNA
tggtctctggagctgtggttg

SEQ ID NO: 6114 - RNA, 21 nt, synthetic construct
  source 1..21: mol_type = other RNA
tggtgggctgggaagccggct

SEQ ID NO: 6115 - RNA, 21 nt, synthetic construct
  source 1..21: mol_type = other RNA
tggttctccttggatctgtgg

SEQ ID NO: 6116 - RNA, 21 nt, synthetic construct
  source 1..21: mol_type = other RNA
tggttgctgctgtgatatgga

SEQ ID NO: 6117 - RNA, 21 nt, synthetic construct
  source 1..21: mol_type = other RNA
tgtgatatggaggaagaagag

SEQ ID NO: 6118 - RNA, 21 nt, synthetic construct
  source 1..21: mol_type = other RNA
tgtggtctctggagctgtggt

SEQ ID NO: 6119 - RNA, 21 nt, synthetic construct
  source 1..21: mol_type = other RNA
tgtggttgctgctgtgatatg

SEQ ID NO: 6120 - RNA, 21 nt, synthetic construct
  source 1..21: mol_type = other RNA
ttacgttcccctcttttccca

SEQ ID NO: 6121 - RNA, 21 nt, synthetic construct
  source 1..21: mol_type = other RNA
ttcccagagccggcttcccag

SEQ ID NO: 6122 - RNA, 21 nt, synthetic construct
  source 1..21: mol_type = other RNA
ttccccacctgagctcttctt

SEQ ID NO: 6123 - RNA, 21 nt, synthetic construct
  source 1..21: mol_type = other RNA
ttcccctcttttcccagagcc

SEQ ID NO: 6124 - RNA, 21 nt, synthetic construct
  source 1..21: mol_type = other RNA
ttccgcagggtcagggctgag

SEQ ID NO: 6125 - RNA, 21 nt, synthetic construct
  source 1..21: mol_type = other RNA
ttcctccatatcacagcagca

SEQ ID NO: 6126 - RNA, 21 nt, synthetic construct
  source 1..21: mol_type = other RNA
ttctcccttccccacctgagc

SEQ ID NO: 6127 - RNA, 21 nt, synthetic construct
  source 1..21: mol_type = other RNA
ttctccttggatctgtggtct

SEQ ID NO: 6128 - RNA, 21 nt, synthetic construct
  source 1..21: mol_type = other RNA
ttcttcctccatatcacagca

SEQ ID NO: 6129 - RNA, 21 nt, synthetic construct
  source 1..21: mol_type = other RNA
ttgctgctgtgatatggagga

SEQ ID NO: 6130 - RNA, 21 nt, synthetic construct
  source 1..21: mol_type = other RNA
ttgctggcctggttctccttg

SEQ ID NO: 6131 - RNA, 21 nt, synthetic construct
  source 1..21: mol_type = other RNA
ttggatctgtggtctctggag

SEQ ID NO: 6132 - RNA, 21 nt, synthetic construct
  source 1..21: mol_type = other RNA
tttcccagagccggcttccca

SEQ ID NO: 6133 - RNA, 21 nt, synthetic construct
  source 1..21: mol_type = other RNA
ttttcccagagccggcttccc

SEQ ID NO: 6134 - RNA, 22 nt, synthetic construct
  source 1..22: mol_type = other RNA
aaaactcagaccccacccttct

SEQ ID NO: 6135 - RNA, 22 nt, synthetic construct
  source 1..22: mol_type = other RNA
aaaagaggggaacgtaaggggc

SEQ ID NO: 6136 - RNA, 22 nt, synthetic construct
  source 1..22: mol_type = other RNA
aaactcagaccccacccttctc

SEQ ID NO: 6137 - RNA, 22 nt, synthetic construct
  source 1..22: mol_type = other RNA
aaagaggggaacgtaaggggcc

SEQ ID NO: 6138 - RNA, 22 nt, synthetic construct
  source 1..22: mol_type = other RNA
aaccacagctccagagaccaca

SEQ ID NO: 6139 - RNA, 22 nt, synthetic construct
  source 1..22: mol_type = other RNA
aacgtaaggggccctgaccccc

SEQ ID NO: 6140 - RNA, 22 nt, synthetic construct
  source 1..22: mol_type = other RNA
aactcagaccccacccttctcc

SEQ ID NO: 6141 - RNA, 22 nt, synthetic construct
  source 1..22: mol_type = other RNA
aagaaaactcagaccccaccct

SEQ ID NO: 6142 - RNA, 22 nt, synthetic construct
  source 1..22: mol_type = other RNA
aagaagagctcaggtggggaag

SEQ ID NO: 6143 - RNA, 22 nt, synthetic construct
  source 1..22: mol_type = other RNA
aagagctcaggtggggaaggga

SEQ ID NO: 6144 - RNA, 22 nt, synthetic construct
  source 1..22: mol_type = other RNA
aagaggggaacgtaaggggccc

SEQ ID NO: 6145 - RNA, 22 nt, synthetic construct
  source 1..22: mol_type = other RNA
aagccggctctgggaaaagagg

SEQ ID NO: 6146 - RNA, 22 nt, synthetic construct
  source 1..22: mol_type = other RNA
aagggagaagggtggggtctga

SEQ ID NO: 6147 - RNA, 22 nt, synthetic construct
  source 1..22: mol_type = other RNA
aaggggccctgacccccaggcc

SEQ ID NO: 6148 - RNA, 22 nt, synthetic construct
  source 1..22: mol_type = other RNA
acaagaaaactcagaccccacc

SEQ ID NO: 6149 - RNA, 22 nt, synthetic construct
  source 1..22: mol_type = other RNA
acagatccaaggagaaccaggc

SEQ ID NO: 6150 - RNA, 22 nt, synthetic construct
  source 1..22: mol_type = other RNA
acagcagcaaccacagctccag

SEQ ID NO: 6151 - RNA, 22 nt, synthetic construct
  source 1..22: mol_type = other RNA
acagctccagagaccacagatc

SEQ ID NO: 6152 - RNA, 22 nt, synthetic construct
  source 1..22: mol_type = other RNA
accacagatccaaggagaacca

SEQ ID NO: 6153 - RNA, 22 nt, synthetic construct
  source 1..22: mol_type = other RNA
accacagctccagagaccacag

SEQ ID NO: 6154 - RNA, 22 nt, synthetic construct
  source 1..22: mol_type = other RNA
accccacccttctcccttcccc

SEQ ID NO: 6155 - RNA, 22 nt, synthetic construct
  source 1..22: mol_type = other RNA
acccccaggcctcagccctgac

SEQ ID NO: 6156 - RNA, 22 nt, synthetic construct
  source 1..22: mol_type = other RNA
acccttctcccttccccacctg

SEQ ID NO: 6157 - RNA, 22 nt, synthetic construct
  source 1..22: mol_type = other RNA
acctgagctcttcttcctccat

SEQ ID NO: 6158 - RNA, 22 nt, synthetic construct
  source 1..22: mol_type = other RNA
acgatggggatggtgggctggg

SEQ ID NO: 6159 - RNA, 22 nt, synthetic construct
  source 1..22: mol_type = other RNA
acgtaaggggccctgaccccca

SEQ ID NO: 6160 - RNA, 22 nt, synthetic construct
  source 1..22: mol_type = other RNA
acgttcccctcttttcccagag

SEQ ID NO: 6161 - RNA, 22 nt, synthetic construct
  source 1..22: mol_type = other RNA
actcagaccccacccttctccc

SEQ ID NO: 6162 - RNA, 22 nt, synthetic construct
  source 1..22: mol_type = other RNA
agaaaactcagaccccaccctt

SEQ ID NO: 6163 - RNA, 22 nt, synthetic construct
  source 1..22: mol_type = other RNA
agaagagctcaggtggggaagg

SEQ ID NO: 6164 - RNA, 22 nt, synthetic construct
  source 1..22: mol_type = other RNA
agaccacagatccaaggagaac

SEQ ID NO: 6165 - RNA, 22 nt, synthetic construct
  source 1..22: mol_type = other RNA
agaccccacccttctcccttcc

SEQ ID NO: 6166 - RNA, 22 nt, synthetic construct
  source 1..22: mol_type = other RNA
agagaccacagatccaaggaga

SEQ ID NO: 6167 - RNA, 22 nt, synthetic construct
  source 1..22: mol_type = other RNA
agagccggcttcccagcccacc

SEQ ID NO: 6168 - RNA, 22 nt, synthetic construct
  source 1..22: mol_type = other RNA
agagctcaggtggggaagggag

SEQ ID NO: 6169 - RNA, 22 nt, synthetic construct
  source 1..22: mol_type = other RNA
agaggggaacgtaaggggccct

SEQ ID NO: 6170 - RNA, 22 nt, synthetic construct
  source 1..22: mol_type = other RNA
agatccaaggagaaccaggcca

SEQ ID NO: 6171 - RNA, 22 nt, synthetic construct
  source 1..22: mol_type = other RNA
agcaaccacagctccagagacc

SEQ ID NO: 6172 - RNA, 22 nt, synthetic construct
  source 1..22: mol_type = other RNA
agcagcaaccacagctccagag

SEQ ID NO: 6173 - RNA, 22 nt, synthetic construct
  source 1..22: mol_type = other RNA
agcccttccgcagggtcagggc

SEQ ID NO: 6174 - RNA, 22 nt, synthetic construct
  source 1..22: mol_type = other RNA
agccggctctgggaaaagaggg

SEQ ID NO: 6175 - RNA, 22 nt, synthetic construct
  source 1..22: mol_type = other RNA
agccggcttcccagcccaccat

SEQ ID NO: 6176 - RNA, 22 nt, synthetic construct
  source 1..22: mol_type = other RNA
agctcaggtggggaagggagaa

SEQ ID NO: 6177 - RNA, 22 nt, synthetic construct
  source 1..22: mol_type = other RNA
agctccagagaccacagatcca

SEQ ID NO: 6178 - RNA, 22 nt, synthetic construct
  source 1..22: mol_type = other RNA
agctcttcttcctccatatcac

SEQ ID NO: 6179 - RNA, 22 nt, synthetic construct
  source 1..22: mol_type = other RNA
agctgtggttgctgctgtgata

SEQ ID NO: 6180 - RNA, 22 nt, synthetic construct
  source 1..22: mol_type = other RNA
aggaagaagagctcaggtgggg

SEQ ID NO: 6181 - RNA, 22 nt, synthetic construct
  source 1..22: mol_type = other RNA
aggcctcagccctgaccctgcg

SEQ ID NO: 6182 - RNA, 22 nt, synthetic construct
  source 1..22: mol_type = other RNA
aggcctgggggtcagggcccct

SEQ ID NO: 6183 - RNA, 22 nt, synthetic construct
  source 1..22: mol_type = other RNA
agggagaagggtggggtctgag

SEQ ID NO: 6184 - RNA, 22 nt, synthetic construct
  source 1..22: mol_type = other RNA
agggccccttacgttcccctct

SEQ ID NO: 6185 - RNA, 22 nt, synthetic construct
  source 1..22: mol_type = other RNA
agggctgaggcctgggggtcag

SEQ ID NO: 6186 - RNA, 22 nt, synthetic construct
  source 1..22: mol_type = other RNA
aggggaacgtaaggggccctga

SEQ ID NO: 6187 - RNA, 22 nt, synthetic construct
  source 1..22: mol_type = other RNA
aggtggggaagggagaagggtg

SEQ ID NO: 6188 - RNA, 22 nt, synthetic construct
  source 1..22: mol_type = other RNA
atatcacagcagcaaccacagc

SEQ ID NO: 6189 - RNA, 22 nt, synthetic construct
  source 1..22: mol_type = other RNA
atatggaggaagaagagctcag

SEQ ID NO: 6190 - RNA, 22 nt, synthetic construct
  source 1..22: mol_type = other RNA
atcacagcagcaaccacagctc

SEQ ID NO: 6191 - RNA, 22 nt, synthetic construct
  source 1..22: mol_type = other RNA
atcattgctggcctggttctcc

SEQ ID NO: 6192 - RNA, 22 nt, synthetic construct
  source 1..22: mol_type = other RNA
atccaaggagaaccaggccagc

SEQ ID NO: 6193 - RNA, 22 nt, synthetic construct
  source 1..22: mol_type = other RNA
atctgtggtctctggagctgtg

SEQ ID NO: 6194 - RNA, 22 nt, synthetic construct
  source 1..22: mol_type = other RNA
atggaggaagaagagctcaggt

SEQ ID NO: 6195 - RNA, 22 nt, synthetic construct
  source 1..22: mol_type = other RNA
atggggatggtgggctgggaag

SEQ ID NO: 6196 - RNA, 22 nt, synthetic construct
  source 1..22: mol_type = other RNA
atggtgggctgggaagccggct

SEQ ID NO: 6197 - RNA, 22 nt, synthetic construct
  source 1..22: mol_type = other RNA
attgctggcctggttctccttg

SEQ ID NO: 6198 - RNA, 22 nt, synthetic construct
  source 1..22: mol_type = other RNA
caaccacagctccagagaccac

SEQ ID NO: 6199 - RNA, 22 nt, synthetic construct
  source 1..22: mol_type = other RNA
caagaaaactcagaccccaccc

SEQ ID NO: 6200 - RNA, 22 nt, synthetic construct
  source 1..22: mol_type = other RNA
cacagatccaaggagaaccagg

SEQ ID NO: 6201 - RNA, 22 nt, synthetic construct
  source 1..22: mol_type = other RNA
cacagcagcaaccacagctcca

SEQ ID NO: 6202 - RNA, 22 nt, synthetic construct
  source 1..22: mol_type = other RNA
cacagctccagagaccacagat

SEQ ID NO: 6203 - RNA, 22 nt, synthetic construct
  source 1..22: mol_type = other RNA
cacccttctcccttccccacct

SEQ ID NO: 6204 - RNA, 22 nt, synthetic construct
  source 1..22: mol_type = other RNA
cacctgagctcttcttcctcca

SEQ ID NO: 6205 - RNA, 22 nt, synthetic construct
  source 1..22: mol_type = other RNA
cacgatggggatggtgggctgg

SEQ ID NO: 6206 - RNA, 22 nt, synthetic construct
  source 1..22: mol_type = other RNA
cagaccccacccttctcccttc

SEQ ID NO: 6207 - RNA, 22 nt, synthetic construct
  source 1..22: mol_type = other RNA
cagagaccacagatccaaggag

SEQ ID NO: 6208 - RNA, 22 nt, synthetic construct
  source 1..22: mol_type = other RNA
cagagccggcttcccagcccac

SEQ ID NO: 6209 - RNA, 22 nt, synthetic construct
  source 1..22: mol_type = other RNA
cagatccaaggagaaccaggcc

SEQ ID NO: 6210 - RNA, 22 nt, synthetic construct
  source 1..22: mol_type = other RNA
cagcaaccacagctccagagac

SEQ ID NO: 6211 - RNA, 22 nt, synthetic construct
  source 1..22: mol_type = other RNA
cagcagcaaccacagctccaga

SEQ ID NO: 6212 - RNA, 22 nt, synthetic construct
  source 1..22: mol_type = other RNA
cagctccagagaccacagatcc

SEQ ID NO: 6213 - RNA, 22 nt, synthetic construct
  source 1..22: mol_type = other RNA
caggcctcagccctgaccctgc

SEQ ID NO: 6214 - RNA, 22 nt, synthetic construct
  source 1..22: mol_type = other RNA
cagggccccttacgttcccctc

SEQ ID NO: 6215 - RNA, 22 nt, synthetic construct
  source 1..22: mol_type = other RNA
caggtggggaagggagaagggt

SEQ ID NO: 6216 - RNA, 22 nt, synthetic construct
  source 1..22: mol_type = other RNA
catatcacagcagcaaccacag

SEQ ID NO: 6217 - RNA, 22 nt, synthetic construct
  source 1..22: mol_type = other RNA
catcattgctggcctggttctc

SEQ ID NO: 6218 - RNA, 22 nt, synthetic construct
  source 1..22: mol_type = other RNA
cattgctggcctggttctcctt

SEQ ID NO: 6219 - RNA, 22 nt, synthetic construct
  source 1..22: mol_type = other RNA
ccacagatccaaggagaaccag

SEQ ID NO: 6220 - RNA, 22 nt, synthetic construct
  source 1..22: mol_type = other RNA
ccacagctccagagaccacaga

SEQ ID NO: 6221 - RNA, 22 nt, synthetic construct
  source 1..22: mol_type = other RNA
ccacccttctcccttccccacc

SEQ ID NO: 6222 - RNA, 22 nt, synthetic construct
  source 1..22: mol_type = other RNA
ccacctgagctcttcttcctcc

SEQ ID NO: 6223 - RNA, 22 nt, synthetic construct
  source 1..22: mol_type = other RNA
ccacgatggggatggtgggctg

SEQ ID NO: 6224 - RNA, 22 nt, synthetic construct
  source 1..22: mol_type = other RNA
ccagagaccacagatccaagga

SEQ ID NO: 6225 - RNA, 22 nt, synthetic construct
  source 1..22: mol_type = other RNA
ccagagccggcttcccagccca

SEQ ID NO: 6226 - RNA, 22 nt, synthetic construct
  source 1..22: mol_type = other RNA
ccaggcctcagccctgaccctg

SEQ ID NO: 6227 - RNA, 22 nt, synthetic construct
  source 1..22: mol_type = other RNA
ccatatcacagcagcaaccaca

SEQ ID NO: 6228 - RNA, 22 nt, synthetic construct
  source 1..22: mol_type = other RNA
cccacccttctcccttccccac

SEQ ID NO: 6229 - RNA, 22 nt, synthetic construct
  source 1..22: mol_type = other RNA
cccacctgagctcttcttcctc

SEQ ID NO: 6230 - RNA, 22 nt, synthetic construct
  source 1..22: mol_type = other RNA
cccacgatggggatggtgggct

SEQ ID NO: 6231 - RNA, 22 nt, synthetic construct
  source 1..22: mol_type = other RNA
cccagagccggcttcccagccc

SEQ ID NO: 6232 - RNA, 22 nt, synthetic construct
  source 1..22: mol_type = other RNA
cccaggcctcagccctgaccct

SEQ ID NO: 6233 - RNA, 22 nt, synthetic construct
  source 1..22: mol_type = other RNA
ccccacccttctcccttcccca

SEQ ID NO: 6234 - RNA, 22 nt, synthetic construct
  source 1..22: mol_type = other RNA
ccccacctgagctcttcttcct

SEQ ID NO: 6235 - RNA, 22 nt, synthetic construct
  source 1..22: mol_type = other RNA
ccccaggcctcagccctgaccc

SEQ ID NO: 6236 - RNA, 22 nt, synthetic construct
  source 1..22: mol_type = other RNA
cccccaggcctcagccctgacc

SEQ ID NO: 6237 - RNA, 22 nt, synthetic construct
  source 1..22: mol_type = other RNA
cccctcttttcccagagccggc

SEQ ID NO: 6238 - RNA, 22 nt, synthetic construct
  source 1..22: mol_type = other RNA
ccccttacgttcccctcttttc

SEQ ID NO: 6239 - RNA, 22 nt, synthetic construct
  source 1..22: mol_type = other RNA
ccctcttttcccagagccggct

SEQ ID NO: 6240 - RNA, 22 nt, synthetic construct
  source 1..22: mol_type = other RNA
cccttacgttcccctcttttcc

SEQ ID NO: 6241 - RNA, 22 nt, synthetic construct
  source 1..22: mol_type = other RNA
cccttccgcagggtcagggctg

SEQ ID NO: 6242 - RNA, 22 nt, synthetic construct
  source 1..22: mol_type = other RNA
cccttctcccttccccacctga

SEQ ID NO: 6243 - RNA, 22 nt, synthetic construct
  source 1..22: mol_type = other RNA
ccgcagggtcagggctgaggcc

SEQ ID NO: 6244 - RNA, 22 nt, synthetic construct
  source 1..22: mol_type = other RNA
ccggctctgggaaaagagggga

SEQ ID NO: 6245 - RNA, 22 nt, synthetic construct
  source 1..22: mol_type = other RNA
ccggcttcccagcccaccatcc

SEQ ID NO: 6246 - RNA, 22 nt, synthetic construct
  source 1..22: mol_type = other RNA
cctcagccctgaccctgcggaa

SEQ ID NO: 6247 - RNA, 22 nt, synthetic construct
  source 1..22: mol_type = other RNA
cctccatatcacagcagcaacc

SEQ ID NO: 6248 - RNA, 22 nt, synthetic construct
  source 1..22: mol_type = other RNA
cctcttttcccagagccggctt

SEQ ID NO: 6249 - RNA, 22 nt, synthetic construct
  source 1..22: mol_type = other RNA
cctgagctcttcttcctccata

SEQ ID NO: 6250 - RNA, 22 nt, synthetic construct
  source 1..22: mol_type = other RNA
cctgggggtcagggccccttac

SEQ ID NO: 6251 - RNA, 22 nt, synthetic construct
  source 1..22: mol_type = other RNA
cctggttctccttggatctgtg

SEQ ID NO: 6252 - RNA, 22 nt, synthetic construct
  source 1..22: mol_type = other RNA
ccttacgttcccctcttttccc

SEQ ID NO: 6253 - RNA, 22 nt, synthetic construct
  source 1..22: mol_type = other RNA
ccttccccacctgagctcttct

SEQ ID NO: 6254 - RNA, 22 nt, synthetic construct
  source 1..22: mol_type = other RNA
ccttccgcagggtcagggctga

SEQ ID NO: 6255 - RNA, 22 nt, synthetic construct
  source 1..22: mol_type = other RNA
ccttctcccttccccacctgag

SEQ ID NO: 6256 - RNA, 22 nt, synthetic construct
  source 1..22: mol_type = other RNA
ccttggatctgtggtctctgga

SEQ ID NO: 6257 - RNA, 22 nt, synthetic construct
  source 1..22: mol_type = other RNA
cgatggggatggtgggctggga

SEQ ID NO: 6258 - RNA, 22 nt, synthetic construct
  source 1..22: mol_type = other RNA
cgcagggtcagggctgaggcct

SEQ ID NO: 6259 - RNA, 22 nt, synthetic construct
  source 1..22: mol_type = other RNA
cggctctgggaaaagaggggaa

SEQ ID NO: 6260 - RNA, 22 nt, synthetic construct
  source 1..22: mol_type = other RNA
cggcttcccagcccaccatccc

SEQ ID NO: 6261 - RNA, 22 nt, synthetic construct
  source 1..22: mol_type = other RNA
cgtaaggggccctgacccccag

SEQ ID NO: 6262 - RNA, 22 nt, synthetic construct
  source 1..22: mol_type = other RNA
cgttcccctcttttcccagagc

SEQ ID NO: 6263 - RNA, 22 nt, synthetic construct
  source 1..22: mol_type = other RNA
ctcagaccccacccttctccct

SEQ ID NO: 6264 - RNA, 22 nt, synthetic construct
  source 1..22: mol_type = other RNA
ctcaggtggggaagggagaagg

SEQ ID NO: 6265 - RNA, 22 nt, synthetic construct
  source 1..22: mol_type = other RNA
ctccagagaccacagatccaag

SEQ ID NO: 6266 - RNA, 22 nt, synthetic construct
  source 1..22: mol_type = other RNA
ctccatatcacagcagcaacca

SEQ ID NO: 6267 - RNA, 22 nt, synthetic construct
  source 1..22: mol_type = other RNA
ctcccttccccacctgagctct

SEQ ID NO: 6268 - RNA, 22 nt, synthetic construct
  source 1..22: mol_type = other RNA
ctccttggatctgtggtctctg

SEQ ID NO: 6269 - RNA, 22 nt, synthetic construct
  source 1..22: mol_type = other RNA
ctctggagctgtggttgctgct

SEQ ID NO: 6270 - RNA, 22 nt, synthetic construct
  source 1..22: mol_type = other RNA
ctctgggaaaagaggggaacgt

SEQ ID NO: 6271 - RNA, 22 nt, synthetic construct
  source 1..22: mol_type = other RNA
ctcttcttcctccatatcacag

SEQ ID NO: 6272 - RNA, 22 nt, synthetic construct
  source 1..22: mol_type = other RNA
ctcttttcccagagccggcttc

SEQ ID NO: 6273 - RNA, 22 nt, synthetic construct
  source 1..22: mol_type = other RNA
ctgagctcttcttcctccatat

SEQ ID NO: 6274 - RNA, 22 nt, synthetic construct
  source 1..22: mol_type = other RNA
ctgaggcctgggggtcagggcc

SEQ ID NO: 6275 - RNA, 22 nt, synthetic construct
  source 1..22: mol_type = other RNA
ctgctgtgatatggaggaagaa

SEQ ID NO: 6276 - RNA, 22 nt, synthetic construct
  source 1..22: mol_type = other RNA
ctggagctgtggttgctgctgt

SEQ ID NO: 6277 - RNA, 22 nt, synthetic construct
  source 1..22: mol_type = other RNA
ctggcctggttctccttggatc

SEQ ID NO: 6278 - RNA, 22 nt, synthetic construct
  source 1..22: mol_type = other RNA
ctgggaaaagaggggaacgtaa

SEQ ID NO: 6279 - RNA, 22 nt, synthetic construct
  source 1..22: mol_type = other RNA
ctgggaagccggctctgggaaa

SEQ ID NO: 6280 - RNA, 22 nt, synthetic construct
  source 1..22: mol_type = other RNA
ctgggggtcagggccccttacg

SEQ ID NO: 6281 - RNA, 22 nt, synthetic construct
  source 1..22: mol_type = other RNA
ctggttctccttggatctgtgg

SEQ ID NO: 6282 - RNA, 22 nt, synthetic construct
  source 1..22: mol_type = other RNA
ctgtgatatggaggaagaagag

SEQ ID NO: 6283 - RNA, 22 nt, synthetic construct
  source 1..22: mol_type = other RNA
ctgtggtctctggagctgtggt

SEQ ID NO: 6284 - RNA, 22 nt, synthetic construct
  source 1..22: mol_type = other RNA
ctgtggttgctgctgtgatatg

SEQ ID NO: 6285 - RNA, 22 nt, synthetic construct
  source 1..22: mol_type = other RNA
cttacgttcccctcttttccca

SEQ ID NO: 6286 - RNA, 22 nt, synthetic construct
  source 1..22: mol_type = other RNA
cttccccacctgagctcttctt

SEQ ID NO: 6287 - RNA, 22 nt, synthetic construct
  source 1..22: mol_type = other RNA
cttccgcagggtcagggctgag

SEQ ID NO: 6288 - RNA, 22 nt, synthetic construct
  source 1..22: mol_type = other RNA
cttcctccatatcacagcagca

SEQ ID NO: 6289 - RNA, 22 nt, synthetic construct
  source 1..22: mol_type = other RNA
cttctcccttccccacctgagc

SEQ ID NO: 6290 - RNA, 22 nt, synthetic construct
  source 1..22: mol_type = other RNA
cttcttcctccatatcacagca

SEQ ID NO: 6291 - RNA, 22 nt, synthetic construct
  source 1..22: mol_type = other RNA
cttggatctgtggtctctggag

SEQ ID NO: 6292 - RNA, 22 nt, synthetic construct
  source 1..22: mol_type = other RNA
cttttcccagagccggcttccc

SEQ ID NO: 6293 - RNA, 22 nt, synthetic construct
  source 1..22: mol_type = other RNA
gaaaactcagaccccacccttc

SEQ ID NO: 6294 - RNA, 22 nt, synthetic construct
  source 1..22: mol_type = other RNA
gaaaagaggggaacgtaagggg

SEQ ID NO: 6295 - RNA, 22 nt, synthetic construct
  source 1..22: mol_type = other RNA
gaacgtaaggggccctgacccc

SEQ ID NO: 6296 - RNA, 22 nt, synthetic construct
  source 1..22: mol_type = other RNA
gaagaagagctcaggtggggaa

SEQ ID NO: 6297 - RNA, 22 nt, synthetic construct
  source 1..22: mol_type = other RNA
gaagagctcaggtggggaaggg

SEQ ID NO: 6298 - RNA, 22 nt, synthetic construct
  source 1..22: mol_type = other RNA
gaagccggctctgggaaaagag

SEQ ID NO: 6299 - RNA, 22 nt, synthetic construct
  source 1..22: mol_type = other RNA
gaagggagaagggtggggtctg

SEQ ID NO: 6300 - RNA, 22 nt, synthetic construct
  source 1..22: mol_type = other RNA
gaccacagatccaaggagaacc

SEQ ID NO: 6301 - RNA, 22 nt, synthetic construct
  source 1..22: mol_type = other RNA
gaccccacccttctcccttccc

SEQ ID NO: 6302 - RNA, 22 nt, synthetic construct
  source 1..22: mol_type = other RNA
gacccccaggcctcagccctga

SEQ ID NO: 6303 - RNA, 22 nt, synthetic construct
  source 1..22: mol_type = other RNA
gagaccacagatccaaggagaa

SEQ ID NO: 6304 - RNA, 22 nt, synthetic construct
  source 1..22: mol_type = other RNA
gagcccttccgcagggtcaggg

SEQ ID NO: 6305 - RNA, 22 nt, synthetic construct
  source 1..22: mol_type = other RNA
gagccggcttcccagcccacca

SEQ ID NO: 6306 - RNA, 22 nt, synthetic construct
  source 1..22: mol_type = other RNA
gagctcaggtggggaagggaga

SEQ ID NO: 6307 - RNA, 22 nt, synthetic construct
  source 1..22: mol_type = other RNA
gagctcttcttcctccatatca

SEQ ID NO: 6308 - RNA, 22 nt, synthetic construct
  source 1..22: mol_type = other RNA
gagctgtggttgctgctgtgat

SEQ ID NO: 6309 - RNA, 22 nt, synthetic construct
  source 1..22: mol_type = other RNA
gaggaagaagagctcaggtggg

SEQ ID NO: 6310 - RNA, 22 nt, synthetic construct
  source 1..22: mol_type = other RNA
gaggggaacgtaaggggccctg

SEQ ID NO: 6311 - RNA, 22 nt, synthetic construct
  source 1..22: mol_type = other RNA
gatatggaggaagaagagctca

SEQ ID NO: 6312 - RNA, 22 nt, synthetic construct
  source 1..22: mol_type = other RNA
gatccaaggagaaccaggccag

SEQ ID NO: 6313 - RNA, 22 nt, synthetic construct
  source 1..22: mol_type = other RNA
gatctgtggtctctggagctgt

SEQ ID NO: 6314 - RNA, 22 nt, synthetic construct
  source 1..22: mol_type = other RNA
gatggggatggtgggctgggaa

SEQ ID NO: 6315 - RNA, 22 nt, synthetic construct
  source 1..22: mol_type = other RNA
gatggtgggctgggaagccggc

SEQ ID NO: 6316 - RNA, 22 nt, synthetic construct
  source 1..22: mol_type = other RNA
gcaaccacagctccagagacca

SEQ ID NO: 6317 - RNA, 22 nt, synthetic construct
  source 1..22: mol_type = other RNA
gcagcaaccacagctccagaga

SEQ ID NO: 6318 - RNA, 22 nt, synthetic construct
  source 1..22: mol_type = other RNA
gcatcattgctggcctggttct

SEQ ID NO: 6319 - RNA, 22 nt, synthetic construct
  source 1..22: mol_type = other RNA
gcccacgatggggatggtgggc

SEQ ID NO: 6320 - RNA, 22 nt, synthetic construct
  source 1..22: mol_type = other RNA
gccccttacgttcccctctttt

SEQ ID NO: 6321 - RNA, 22 nt, synthetic construct
  source 1..22: mol_type = other RNA
gcccttccgcagggtcagggct

SEQ ID NO: 6322 - RNA, 22 nt, synthetic construct
  source 1..22: mol_type = other RNA
gccggctctgggaaaagagggg

SEQ ID NO: 6323 - RNA, 22 nt, synthetic construct
  source 1..22: mol_type = other RNA
gccggcttcccagcccaccatc

SEQ ID NO: 6324 - RNA, 22 nt, synthetic construct
  source 1..22: mol_type = other RNA
gcctcagccctgaccctgcgga

SEQ ID NO: 6325 - RNA, 22 nt, synthetic construct
  source 1..22: mol_type = other RNA
gcctgggggtcagggcccctta

SEQ ID NO: 6326 - RNA, 22 nt, synthetic construct
  source 1..22: mol_type = other RNA
gcctggttctccttggatctgt

SEQ ID NO: 6327 - RNA, 22 nt, synthetic construct
  source 1..22: mol_type = other RNA
gctcaggtggggaagggagaag

SEQ ID NO: 6328 - RNA, 22 nt, synthetic construct
  source 1..22: mol_type = other RNA
gctccagagaccacagatccaa

SEQ ID NO: 6329 - RNA, 22 nt, synthetic construct
  source 1..22: mol_type = other RNA
gctctgggaaaagaggggaacg

SEQ ID NO: 6330 - RNA, 22 nt, synthetic construct
  source 1..22: mol_type = other RNA
gctcttcttcctccatatcaca

SEQ ID NO: 6331 - RNA, 22 nt, synthetic construct
  source 1..22: mol_type = other RNA
gctgaggcctgggggtcagggc

SEQ ID NO: 6332 - RNA, 22 nt, synthetic construct
  source 1..22: mol_type = other RNA
gctgctgtgatatggaggaaga

SEQ ID NO: 6333 - RNA, 22 nt, synthetic construct
  source 1..22: mol_type = other RNA
gctggcctggttctccttggat

SEQ ID NO: 6334 - RNA, 22 nt, synthetic construct
  source 1..22: mol_type = other RNA
gctgggaagccggctctgggaa

SEQ ID NO: 6335 - RNA, 22 nt, synthetic construct
  source 1..22: mol_type = other RNA
gctgtgatatggaggaagaaga

SEQ ID NO: 6336 - RNA, 22 nt, synthetic construct
  source 1..22: mol_type = other RNA
gctgtggttgctgctgtgatat

SEQ ID NO: 6337 - RNA, 22 nt, synthetic construct
  source 1..22: mol_type = other RNA
gcttcccagcccaccatcccca

SEQ ID NO: 6338 - RNA, 22 nt, synthetic construct
  source 1..22: mol_type = other RNA
ggaaaagaggggaacgtaaggg

SEQ ID NO: 6339 - RNA, 22 nt, synthetic construct
  source 1..22: mol_type = other RNA
ggaacgtaaggggccctgaccc

SEQ ID NO: 6340 - RNA, 22 nt, synthetic construct
  source 1..22: mol_type = other RNA
ggaagaagagctcaggtgggga

SEQ ID NO: 6341 - RNA, 22 nt, synthetic construct
  source 1..22: mol_type = other RNA
ggaagccggctctgggaaaaga

SEQ ID NO: 6342 - RNA, 22 nt, synthetic construct
  source 1..22: mol_type = other RNA
ggaagggagaagggtggggtct

SEQ ID NO: 6343 - RNA, 22 nt, synthetic construct
  source 1..22: mol_type = other RNA
ggagcccttccgcagggtcagg

SEQ ID NO: 6344 - RNA, 22 nt, synthetic construct
  source 1..22: mol_type = other RNA
ggagctgtggttgctgctgtga

SEQ ID NO: 6345 - RNA, 22 nt, synthetic construct
  source 1..22: mol_type = other RNA
ggaggaagaagagctcaggtgg

SEQ ID NO: 6346 - RNA, 22 nt, synthetic construct
  source 1..22: mol_type = other RNA
ggatctgtggtctctggagctg

SEQ ID NO: 6347 - RNA, 22 nt, synthetic construct
  source 1..22: mol_type = other RNA
ggatggtgggctgggaagccgg

SEQ ID NO: 6348 - RNA, 22 nt, synthetic construct
  source 1..22: mol_type = other RNA
ggccccttacgttcccctcttt

SEQ ID NO: 6349 - RNA, 22 nt, synthetic construct
  source 1..22: mol_type = other RNA
ggcctcagccctgaccctgcgg

SEQ ID NO: 6350 - RNA, 22 nt, synthetic construct
  source 1..22: mol_type = other RNA
ggcctgggggtcagggcccctt

SEQ ID NO: 6351 - RNA, 22 nt, synthetic construct
  source 1..22: mol_type = other RNA
ggcctggttctccttggatctg

SEQ ID NO: 6352 - RNA, 22 nt, synthetic construct
  source 1..22: mol_type = other RNA
ggctctgggaaaagaggggaac

SEQ ID NO: 6353 - RNA, 22 nt, synthetic construct
  source 1..22: mol_type = other RNA
ggctgaggcctgggggtcaggg

SEQ ID NO: 6354 - RNA, 22 nt, synthetic construct
  source 1..22: mol_type = other RNA
ggctgggaagccggctctggga

SEQ ID NO: 6355 - RNA, 22 nt, synthetic construct
  source 1..22: mol_type = other RNA
ggcttcccagcccaccatcccc

SEQ ID NO: 6356 - RNA, 22 nt, synthetic construct
  source 1..22: mol_type = other RNA
gggaaaagaggggaacgtaagg

SEQ ID NO: 6357 - RNA, 22 nt, synthetic construct
  source 1..22: mol_type = other RNA
gggaacgtaaggggccctgacc

SEQ ID NO: 6358 - RNA, 22 nt, synthetic construct
  source 1..22: mol_type = other RNA
gggaagccggctctgggaaaag

SEQ ID NO: 6359 - RNA, 22 nt, synthetic construct
  source 1..22: mol_type = other RNA
gggaagggagaagggtggggtc

SEQ ID NO: 6360 - RNA, 22 nt, synthetic construct
  source 1..22: mol_type = other RNA
gggagaagggtggggtctgagt

SEQ ID NO: 6361 - RNA, 22 nt, synthetic construct
  source 1..22: mol_type = other RNA
gggatggtgggctgggaagccg

SEQ ID NO: 6362 - RNA, 22 nt, synthetic construct
  source 1..22: mol_type = other RNA
gggccccttacgttcccctctt

SEQ ID NO: 6363 - RNA, 22 nt, synthetic construct
  source 1..22: mol_type = other RNA
gggctgaggcctgggggtcagg

SEQ ID NO: 6364 - RNA, 22 nt, synthetic construct
  source 1..22: mol_type = other RNA
gggctgggaagccggctctggg

SEQ ID NO: 6365 - RNA, 22 nt, synthetic construct
  source 1..22: mol_type = other RNA
ggggaacgtaaggggccctgac

SEQ ID NO: 6366 - RNA, 22 nt, synthetic construct
  source 1..22: mol_type = other RNA
ggggaagggagaagggtggggt

SEQ ID NO: 6367 - RNA, 22 nt, synthetic construct
  source 1..22: mol_type = other RNA
ggggatggtgggctgggaagcc

SEQ ID NO: 6368 - RNA, 22 nt, synthetic construct
  source 1..22: mol_type = other RNA
gggggtcagggccccttacgtt

SEQ ID NO: 6369 - RNA, 22 nt, synthetic construct
  source 1..22: mol_type = other RNA
ggggtcagggccccttacgttc

SEQ ID NO: 6370 - RNA, 22 nt, synthetic construct
  source 1..22: mol_type = other RNA
gggtcagggccccttacgttcc

SEQ ID NO: 6371 - RNA, 22 nt, synthetic construct
  source 1..22: mol_type = other RNA
ggtcagggccccttacgttccc

SEQ ID NO: 6372 - RNA, 22 nt, synthetic construct
  source 1..22: mol_type = other RNA
ggtctctggagctgtggttgct

SEQ ID NO: 6373 - RNA, 22 nt, synthetic construct
  source 1..22: mol_type = other RNA
ggtgggctgggaagccggctct

SEQ ID NO: 6374 - RNA, 22 nt, synthetic construct
  source 1..22: mol_type = other RNA
ggtggggaagggagaagggtgg

SEQ ID NO: 6375 - RNA, 22 nt, synthetic construct
  source 1..22: mol_type = other RNA
ggttctccttggatctgtggtc

SEQ ID NO: 6376 - RNA, 22 nt, synthetic construct
  source 1..22: mol_type = other RNA
ggttgctgctgtgatatggagg

SEQ ID NO: 6377 - RNA, 22 nt, synthetic construct
  source 1..22: mol_type = other RNA
gtaaggggccctgacccccagg

SEQ ID NO: 6378 - RNA, 22 nt, synthetic construct
  source 1..22: mol_type = other RNA
gtcagggccccttacgttcccc

SEQ ID NO: 6379 - RNA, 22 nt, synthetic construct
  source 1..22: mol_type = other RNA
gtctctggagctgtggttgctg

SEQ ID NO: 6380 - RNA, 22 nt, synthetic construct
  source 1..22: mol_type = other RNA
gtgatatggaggaagaagagct

SEQ ID NO: 6381 - RNA, 22 nt, synthetic construct
  source 1..22: mol_type = other RNA
gtgggctgggaagccggctctg

SEQ ID NO: 6382 - RNA, 22 nt, synthetic construct
  source 1..22: mol_type = other RNA
gtggggaagggagaagggtggg

SEQ ID NO: 6383 - RNA, 22 nt, synthetic construct
  source 1..22: mol_type = other RNA
gtggtctctggagctgtggttg

SEQ ID NO: 6384 - RNA, 22 nt, synthetic construct
  source 1..22: mol_type = other RNA
gtggttgctgctgtgatatgga

SEQ ID NO: 6385 - RNA, 22 nt, synthetic construct
  source 1..22: mol_type = other RNA
gttcccctcttttcccagagcc

SEQ ID NO: 6386 - RNA, 22 nt, synthetic construct
  source 1..22: mol_type = other RNA
gttctccttggatctgtggtct

SEQ ID NO: 6387 - RNA, 22 nt, synthetic construct
  source 1..22: mol_type = other RNA
gttgctgctgtgatatggagga

SEQ ID NO: 6388 - RNA, 22 nt, synthetic construct
  source 1..22: mol_type = other RNA
taaggggccctgacccccaggc

SEQ ID NO: 6389 - RNA, 22 nt, synthetic construct
  source 1..22: mol_type = other RNA
tacgttcccctcttttcccaga

SEQ ID NO: 6390 - RNA, 22 nt, synthetic construct
  source 1..22: mol_type = other RNA
tatcacagcagcaaccacagct

SEQ ID NO: 6391 - RNA, 22 nt, synthetic construct
  source 1..22: mol_type = other RNA
tatggaggaagaagagctcagg

SEQ ID NO: 6392 - RNA, 22 nt, synthetic construct
  source 1..22: mol_type = other RNA
tcacagcagcaaccacagctcc

SEQ ID NO: 6393 - RNA, 22 nt, synthetic construct
  source 1..22: mol_type = other RNA
tcagaccccacccttctccctt

SEQ ID NO: 6394 - RNA, 22 nt, synthetic construct
  source 1..22: mol_type = other RNA
tcagggccccttacgttcccct

SEQ ID NO: 6395 - RNA, 22 nt, synthetic construct
  source 1..22: mol_type = other RNA
tcaggtggggaagggagaaggg

SEQ ID NO: 6396 - RNA, 22 nt, synthetic construct
  source 1..22: mol_type = other RNA
tcattgctggcctggttctcct

SEQ ID NO: 6397 - RNA, 22 nt, synthetic construct
  source 1..22: mol_type = other RNA
tccagagaccacagatccaagg

SEQ ID NO: 6398 - RNA, 22 nt, synthetic construct
  source 1..22: mol_type = other RNA
tccatatcacagcagcaaccac

SEQ ID NO: 6399 - RNA, 22 nt, synthetic construct
  source 1..22: mol_type = other RNA
tcccagagccggcttcccagcc

SEQ ID NO: 6400 - RNA, 22 nt, synthetic construct
  source 1..22: mol_type = other RNA
tccccacctgagctcttcttcc

SEQ ID NO: 6401 - RNA, 22 nt, synthetic construct
  source 1..22: mol_type = other RNA
tcccctcttttcccagagccgg

SEQ ID NO: 6402 - RNA, 22 nt, synthetic construct
  source 1..22: mol_type = other RNA
tcccttccccacctgagctctt

SEQ ID NO: 6403 - RNA, 22 nt, synthetic construct
  source 1..22: mol_type = other RNA
tccgcagggtcagggctgaggc

SEQ ID NO: 6404 - RNA, 22 nt, synthetic construct
  source 1..22: mol_type = other RNA
tcctccatatcacagcagcaac

SEQ ID NO: 6405 - RNA, 22 nt, synthetic construct
  source 1..22: mol_type = other RNA
tccttggatctgtggtctctgg

SEQ ID NO: 6406 - RNA, 22 nt, synthetic construct
  source 1..22: mol_type = other RNA
tctcccttccccacctgagctc

SEQ ID NO: 6407 - RNA, 22 nt, synthetic construct
  source 1..22: mol_type = other RNA
tctccttggatctgtggtctct

SEQ ID NO: 6408 - RNA, 22 nt, synthetic construct
  source 1..22: mol_type = other RNA
tctctggagctgtggttgctgc

SEQ ID NO: 6409 - RNA, 22 nt, synthetic construct
  source 1..22: mol_type = other RNA
tctggagctgtggttgctgctg

SEQ ID NO: 6410 - RNA, 22 nt, synthetic construct
  source 1..22: mol_type = other RNA
tctgggaaaagaggggaacgta

SEQ ID NO: 6411 - RNA, 22 nt, synthetic construct
  source 1..22: mol_type = other RNA
tctgtggtctctggagctgtgg

SEQ ID NO: 6412 - RNA, 22 nt, synthetic construct
  source 1..22: mol_type = other RNA
tcttcctccatatcacagcagc

SEQ ID NO: 6413 - RNA, 22 nt, synthetic construct
  source 1..22: mol_type = other RNA
tcttcttcctccatatcacagc

SEQ ID NO: 6414 - RNA, 22 nt, synthetic construct
  source 1..22: mol_type = other RNA
tcttttcccagagccggcttcc

SEQ ID NO: 6415 - RNA, 22 nt, synthetic construct
  source 1..22: mol_type = other RNA
tgacccccaggcctcagccctg

SEQ ID NO: 6416 - RNA, 22 nt, synthetic construct
  source 1..22: mol_type = other RNA
tgagctcttcttcctccatatc

SEQ ID NO: 6417 - RNA, 22 nt, synthetic construct
  source 1..22: mol_type = other RNA
tgaggcctgggggtcagggccc

SEQ ID NO: 6418 - RNA, 22 nt, synthetic construct
  source 1..22: mol_type = other RNA
tgatatggaggaagaagagctc

SEQ ID NO: 6419 - RNA, 22 nt, synthetic construct
  source 1..22: mol_type = other RNA
tgctgctgtgatatggaggaag

SEQ ID NO: 6420 - RNA, 22 nt, synthetic construct
  source 1..22: mol_type = other RNA
tgctggcctggttctccttgga

SEQ ID NO: 6421 - RNA, 22 nt, synthetic construct
  source 1..22: mol_type = other RNA
tgctgtgatatggaggaagaag

SEQ ID NO: 6422 - RNA, 22 nt, synthetic construct
  source 1..22: mol_type = other RNA
tggagcccttccgcagggtcag

SEQ ID NO: 6423 - RNA, 22 nt, synthetic construct
  source 1..22: mol_type = other RNA
tggagctgtggttgctgctgtg

SEQ ID NO: 6424 - RNA, 22 nt, synthetic construct
  source 1..22: mol_type = other RNA
tggatctgtggtctctggagct

SEQ ID NO: 6425 - RNA, 22 nt, synthetic construct
  source 1..22: mol_type = other RNA
tggcctggttctccttggatct

SEQ ID NO: 6426 - RNA, 22 nt, synthetic construct
  source 1..22: mol_type = other RNA
tgggaaaagaggggaacgtaag

SEQ ID NO: 6427 - RNA, 22 nt, synthetic construct
  source 1..22: mol_type = other RNA
tgggaagccggctctgggaaaa

SEQ ID NO: 6428 - RNA, 22 nt, synthetic construct
  source 1..22: mol_type = other RNA
tgggctgggaagccggctctgg

SEQ ID NO: 6429 - RNA, 22 nt, synthetic construct
  source 1..22: mol_type = other RNA
tggggaagggagaagggtgggg

SEQ ID NO: 6430 - RNA, 22 nt, synthetic construct
  source 1..22: mol_type = other RNA
tggggatggtgggctgggaagc

SEQ ID NO: 6431 - RNA, 22 nt, synthetic construct
  source 1..22: mol_type = other RNA
tgggggtcagggccccttacgt

SEQ ID NO: 6432 - RNA, 22 nt, synthetic construct
  source 1..22: mol_type = other RNA
tggtctctggagctgtggttgc

SEQ ID NO: 6433 - RNA, 22 nt, synthetic construct
  source 1..22: mol_type = other RNA
tggtgggctgggaagccggctc

SEQ ID NO: 6434 - RNA, 22 nt, synthetic construct
  source 1..22: mol_type = other RNA
tggttctccttggatctgtggt

SEQ ID NO: 6435 - RNA, 22 nt, synthetic construct
  source 1..22: mol_type = other RNA
tggttgctgctgtgatatggag

SEQ ID NO: 6436 - RNA, 22 nt, synthetic construct
  source 1..22: mol_type = other RNA
tgtgatatggaggaagaagagc

SEQ ID NO: 6437 - RNA, 22 nt, synthetic construct
  source 1..22: mol_type = other RNA
tgtggtctctggagctgtggtt

SEQ ID NO: 6438 - RNA, 22 nt, synthetic construct
  source 1..22: mol_type = other RNA
tgtggttgctgctgtgatatgg

SEQ ID NO: 6439 - RNA, 22 nt, synthetic construct
  source 1..22: mol_type = other RNA
ttacgttcccctcttttcccag

SEQ ID NO: 6440 - RNA, 22 nt, synthetic construct
  source 1..22: mol_type = other RNA
ttcccagagccggcttcccagc

SEQ ID NO: 6441 - RNA, 22 nt, synthetic construct
  source 1..22: mol_type = other RNA
ttccccacctgagctcttcttc

SEQ ID NO: 6442 - RNA, 22 nt, synthetic construct
  source 1..22: mol_type = other RNA
ttcccctcttttcccagagccg

SEQ ID NO: 6443 - RNA, 22 nt, synthetic construct
  source 1..22: mol_type = other RNA
ttccgcagggtcagggctgagg

SEQ ID NO: 6444 - RNA, 22 nt, synthetic construct
  source 1..22: mol_type = other RNA
ttcctccatatcacagcagcaa

SEQ ID NO: 6445 - RNA, 22 nt, synthetic construct
  source 1..22: mol_type = other RNA
ttctcccttccccacctgagct

SEQ ID NO: 6446 - RNA, 22 nt, synthetic construct
  source 1..22: mol_type = other RNA
ttctccttggatctgtggtctc

SEQ ID NO: 6447 - RNA, 22 nt, synthetic construct
  source 1..22: mol_type = other RNA
ttcttcctccatatcacagcag

SEQ ID NO: 6448 - RNA, 22 nt, synthetic construct
  source 1..22: mol_type = other RNA
ttgctgctgtgatatggaggaa

SEQ ID NO: 6449 - RNA, 22 nt, synthetic construct
  source 1..22: mol_type = other RNA
ttgctggcctggttctccttgg

SEQ ID NO: 6450 - RNA, 22 nt, synthetic construct
  source 1..22: mol_type = other RNA
ttggatctgtggtctctggagc

SEQ ID NO: 6451 - RNA, 22 nt, synthetic construct
  source 1..22: mol_type = other RNA
tttcccagagccggcttcccag

SEQ ID NO: 6452 - RNA, 22 nt, synthetic construct
  source 1..22: mol_type = other RNA
ttttcccagagccggcttccca

SEQ ID NO: 6453 - RNA, 20 nt, synthetic construct
  source 1..20: mol_type = other RNA
aaaaggagggagctactcta

SEQ ID NO: 6454 - RNA, 20 nt, synthetic construct
  source 1..20: mol_type = other RNA
aaaatgtcctgtgaggggcc

SEQ ID NO: 6455 - RNA, 20 nt, synthetic construct
  source 1..20: mol_type = other RNA
aaaggagggagctactctaa

SEQ ID NO: 6456 - RNA, 20 nt, synthetic construct
  source 1..20: mol_type = other RNA
aaatgtcctgtgaggggcca

SEQ ID NO: 6457 - RNA, 20 nt, synthetic construct
  source 1..20: mol_type = other RNA
aacaggtggaaaaggaggga

SEQ ID NO: 6458 - RNA, 20 nt, synthetic construct
  source 1..20: mol_type = other RNA
aagaaaatgtcctgtgaggg

SEQ ID NO: 6459 - RNA, 20 nt, synthetic construct
  source 1..20: mol_type = other RNA
aaggagggagctactctaag

SEQ ID NO: 6460 - RNA, 20 nt, synthetic construct
  source 1..20: mol_type = other RNA
aaggctgagtgtaagtgcgg

SEQ ID NO: 6461 - RNA, 20 nt, synthetic construct
  source 1..20: mol_type = other RNA
aagtgcggggcgggagcgtg

SEQ ID NO: 6462 - RNA, 20 nt, synthetic construct
  source 1..20: mol_type = other RNA
aatgtcctgtgaggggccag

SEQ ID NO: 6463 - RNA, 20 nt, synthetic construct
  source 1..20: mol_type = other RNA
acactcagccttagagtagc

SEQ ID NO: 6464 - RNA, 20 nt, synthetic construct
  source 1..20: mol_type = other RNA
acaggacattttcttccaac

SEQ ID NO: 6465 - RNA, 20 nt, synthetic construct
  source 1..20: mol_type = other RNA
acaggtggaaaaggagggag

SEQ ID NO: 6466 - RNA, 20 nt, synthetic construct
  source 1..20: mol_type = other RNA
acattttcttccaacaggtg

SEQ ID NO: 6467 - RNA, 20 nt, synthetic construct
  source 1..20: mol_type = other RNA
acctgttggaagaaaatgtc

SEQ ID NO: 6468 - RNA, 20 nt, synthetic construct
  source 1..20: mol_type = other RNA
accttatggccctgcctcct

SEQ ID NO: 6469 - RNA, 20 nt, synthetic construct
  source 1..20: mol_type = other RNA
acgctcccgccccgcactta

SEQ ID NO: 6470 - RNA, 20 nt, synthetic construct
  source 1..20: mol_type = other RNA
actcagccttagagtagctc

SEQ ID NO: 6471 - RNA, 20 nt, synthetic construct
  source 1..20: mol_type = other RNA
actctaaggctgagtgtaag

SEQ ID NO: 6472 - RNA, 20 nt, synthetic construct
  source 1..20: mol_type = other RNA
acttacactcagccttagag

SEQ ID NO: 6473 - RNA, 20 nt, synthetic construct
  source 1..20: mol_type = other RNA
agaaaatgtcctgtgagggg

SEQ ID NO: 6474 - RNA, 20 nt, synthetic construct
  source 1..20: mol_type = other RNA
agagtagctccctccttttc

SEQ ID NO: 6475 - RNA, 20 nt, synthetic construct
  source 1..20: mol_type = other RNA
agccttagagtagctccctc

SEQ ID NO: 6476 - RNA, 20 nt, synthetic construct
  source 1..20: mol_type = other RNA
agctactctaaggctgagtg

SEQ ID NO: 6477 - RNA, 20 nt, synthetic construct
  source 1..20: mol_type = other RNA
agctccctccttttccacct

SEQ ID NO: 6478 - RNA, 20 nt, synthetic construct
  source 1..20: mol_type = other RNA
agctcctccacgctcccgcc

SEQ ID NO: 6479 - RNA, 20 nt, synthetic construct
  source 1..20: mol_type = other RNA
aggacattttcttccaacag

SEQ ID NO: 6480 - RNA, 20 nt, synthetic construct
  source 1..20: mol_type = other RNA
aggaccttatggccctgcct

SEQ ID NO: 6481 - RNA, 20 nt, synthetic construct
  source 1..20: mol_type = other RNA
aggaggcagggccataaggt

SEQ ID NO: 6482 - RNA, 20 nt, synthetic construct
  source 1..20: mol_type = other RNA
aggagggagctactctaagg

SEQ ID NO: 6483 - RNA, 20 nt, synthetic construct
  source 1..20: mol_type = other RNA
aggaggttcctctaggacct

SEQ ID NO: 6484 - RNA, 20 nt, synthetic construct
  source 1..20: mol_type = other RNA
aggcagggccataaggtcct

SEQ ID NO: 6485 - RNA, 20 nt, synthetic construct
  source 1..20: mol_type = other RNA
aggctgagtgtaagtgcggg

SEQ ID NO: 6486 - RNA, 20 nt, synthetic construct
  source 1..20: mol_type = other RNA
agggagctactctaaggctg

SEQ ID NO: 6487 - RNA, 20 nt, synthetic construct
  source 1..20: mol_type = other RNA
agggaggaggcagggccata

SEQ ID NO: 6488 - RNA, 20 nt, synthetic construct
  source 1..20: mol_type = other RNA
aggggccagggaggaggcag

SEQ ID NO: 6489 - RNA, 20 nt, synthetic construct
  source 1..20: mol_type = other RNA
aggtggaaaaggagggagct

SEQ ID NO: 6490 - RNA, 20 nt, synthetic construct
  source 1..20: mol_type = other RNA
aggttcctctaggaccttat

SEQ ID NO: 6491 - RNA, 20 nt, synthetic construct
  source 1..20: mol_type = other RNA
agtagctccctccttttcca

SEQ ID NO: 6492 - RNA, 20 nt, synthetic construct
  source 1..20: mol_type = other RNA
agtgcggggcgggagcgtgg

SEQ ID NO: 6493 - RNA, 20 nt, synthetic construct
  source 1..20: mol_type = other RNA
agtgtaagtgcggggcggga

SEQ ID NO: 6494 - RNA, 20 nt, synthetic construct
  source 1..20: mol_type = other RNA
atggccctgcctcctccctg

SEQ ID NO: 6495 - RNA, 20 nt, synthetic construct
  source 1..20: mol_type = other RNA
atgtcctgtgaggggccagg

SEQ ID NO: 6496 - RNA, 20 nt, synthetic construct
  source 1..20: mol_type = other RNA
attttcttccaacaggtgga

SEQ ID NO: 6497 - RNA, 20 nt, synthetic construct
  source 1..20: mol_type = other RNA
caacaggtggaaaaggaggg

SEQ ID NO: 6498 - RNA, 20 nt, synthetic construct
  source 1..20: mol_type = other RNA
cacaggacattttcttccaa

SEQ ID NO: 6499 - RNA, 20 nt, synthetic construct
  source 1..20: mol_type = other RNA
cacctgttggaagaaaatgt

SEQ ID NO: 6500 - RNA, 20 nt, synthetic construct
  source 1..20: mol_type = other RNA
cacgctcccgccccgcactt

SEQ ID NO: 6501 - RNA, 20 nt, synthetic construct
  source 1..20: mol_type = other RNA
cactcagccttagagtagct

SEQ ID NO: 6502 - RNA, 20 nt, synthetic construct
  source 1..20: mol_type = other RNA
cacttacactcagccttaga

SEQ ID NO: 6503 - RNA, 20 nt, synthetic construct
  source 1..20: mol_type = other RNA
cagccttagagtagctccct

SEQ ID NO: 6504 - RNA, 20 nt, synthetic construct
  source 1..20: mol_type = other RNA
caggacattttcttccaaca

SEQ ID NO: 6505 - RNA, 20 nt, synthetic construct
  source 1..20: mol_type = other RNA
cagggaggaggcagggccat

SEQ ID NO: 6506 - RNA, 20 nt, synthetic construct
  source 1..20: mol_type = other RNA
caggtggaaaaggagggagc

SEQ ID NO: 6507 - RNA, 20 nt, synthetic construct
  source 1..20: mol_type = other RNA
cattttcttccaacaggtgg

SEQ ID NO: 6508 - RNA, 20 nt, synthetic construct
  source 1..20: mol_type = other RNA
ccaacaggtggaaaaggagg

SEQ ID NO: 6509 - RNA, 20 nt, synthetic construct
  source 1..20: mol_type = other RNA
ccacctgttggaagaaaatg

SEQ ID NO: 6510 - RNA, 20 nt, synthetic construct
  source 1..20: mol_type = other RNA
ccacgctcccgccccgcact

SEQ ID NO: 6511 - RNA, 20 nt, synthetic construct
  source 1..20: mol_type = other RNA
ccagggaggaggcagggcca

SEQ ID NO: 6512 - RNA, 20 nt, synthetic construct
  source 1..20: mol_type = other RNA
ccccgcacttacactcagcc

SEQ ID NO: 6513 - RNA, 20 nt, synthetic construct
  source 1..20: mol_type = other RNA
cccctcacaggacattttct

SEQ ID NO: 6514 - RNA, 20 nt, synthetic construct
  source 1..20: mol_type = other RNA
cccgcacttacactcagcct

SEQ ID NO: 6515 - RNA, 20 nt, synthetic construct
  source 1..20: mol_type = other RNA
cccgccccgcacttacactc

SEQ ID NO: 6516 - RNA, 20 nt, synthetic construct
  source 1..20: mol_type = other RNA
ccctcacaggacattttctt

SEQ ID NO: 6517 - RNA, 20 nt, synthetic construct
  source 1..20: mol_type = other RNA
ccctccttttccacctgttg

SEQ ID NO: 6518 - RNA, 20 nt, synthetic construct
  source 1..20: mol_type = other RNA
ccctgcctcctccctggccc

SEQ ID NO: 6519 - RNA, 20 nt, synthetic construct
  source 1..20: mol_type = other RNA
ccctggcccctcacaggaca

SEQ ID NO: 6520 - RNA, 20 nt, synthetic construct
  source 1..20: mol_type = other RNA
ccgcacttacactcagcctt

SEQ ID NO: 6521 - RNA, 20 nt, synthetic construct
  source 1..20: mol_type = other RNA
ccgccccgcacttacactca

SEQ ID NO: 6522 - RNA, 20 nt, synthetic construct
  source 1..20: mol_type = other RNA
cctcacaggacattttcttc

SEQ ID NO: 6523 - RNA, 20 nt, synthetic construct
  source 1..20: mol_type = other RNA
cctccctggcccctcacagg

SEQ ID NO: 6524 - RNA, 20 nt, synthetic construct
  source 1..20: mol_type = other RNA
cctcctccctggcccctcac

SEQ ID NO: 6525 - RNA, 20 nt, synthetic construct
  source 1..20: mol_type = other RNA
cctccttttccacctgttgg

SEQ ID NO: 6526 - RNA, 20 nt, synthetic construct
  source 1..20: mol_type = other RNA
cctctaggaccttatggccc

SEQ ID NO: 6527 - RNA, 20 nt, synthetic construct
  source 1..20: mol_type = other RNA
cctgcctcctccctggcccc

SEQ ID NO: 6528 - RNA, 20 nt, synthetic construct
  source 1..20: mol_type = other RNA
cctggcccctcacaggacat

SEQ ID NO: 6529 - RNA, 20 nt, synthetic construct
  source 1..20: mol_type = other RNA
cctgtgaggggccagggagg

SEQ ID NO: 6530 - RNA, 20 nt, synthetic construct
  source 1..20: mol_type = other RNA
cctgttggaagaaaatgtcc

SEQ ID NO: 6531 - RNA, 20 nt, synthetic construct
  source 1..20: mol_type = other RNA
ccttagagtagctccctcct

SEQ ID NO: 6532 - RNA, 20 nt, synthetic construct
  source 1..20: mol_type = other RNA
ccttatggccctgcctcctc

SEQ ID NO: 6533 - RNA, 20 nt, synthetic construct
  source 1..20: mol_type = other RNA
ccttttccacctgttggaag

SEQ ID NO: 6534 - RNA, 20 nt, synthetic construct
  source 1..20: mol_type = other RNA
cgagctcctccacgctcccg

SEQ ID NO: 6535 - RNA, 20 nt, synthetic construct
  source 1..20: mol_type = other RNA
cgcacttacactcagcctta

SEQ ID NO: 6536 - RNA, 20 nt, synthetic construct
  source 1..20: mol_type = other RNA
cgccccgcacttacactcag

SEQ ID NO: 6537 - RNA, 20 nt, synthetic construct
  source 1..20: mol_type = other RNA
cgctcccgccccgcacttac

SEQ ID NO: 6538 - RNA, 20 nt, synthetic construct
  source 1..20: mol_type = other RNA
cggggcgggagcgtggagga

SEQ ID NO: 6539 - RNA, 20 nt, synthetic construct
  source 1..20: mol_type = other RNA
ctaaggctgagtgtaagtgc

SEQ ID NO: 6540 - RNA, 20 nt, synthetic construct
  source 1..20: mol_type = other RNA
ctactctaaggctgagtgta

SEQ ID NO: 6541 - RNA, 20 nt, synthetic construct
  source 1..20: mol_type = other RNA
ctaggaccttatggccctgc

SEQ ID NO: 6542 - RNA, 20 nt, synthetic construct
  source 1..20: mol_type = other RNA
ctcacaggacattttcttcc

SEQ ID NO: 6543 - RNA, 20 nt, synthetic construct
  source 1..20: mol_type = other RNA
ctcagccttagagtagctcc

SEQ ID NO: 6544 - RNA, 20 nt, synthetic construct
  source 1..20: mol_type = other RNA
ctccacgctcccgccccgca

SEQ ID NO: 6545 - RNA, 20 nt, synthetic construct
  source 1..20: mol_type = other RNA
ctcccgccccgcacttacac

SEQ ID NO: 6546 - RNA, 20 nt, synthetic construct
  source 1..20: mol_type = other RNA
ctccctccttttccacctgt

SEQ ID NO: 6547 - RNA, 20 nt, synthetic construct
  source 1..20: mol_type = other RNA
ctccctggcccctcacagga

SEQ ID NO: 6548 - RNA, 20 nt, synthetic construct
  source 1..20: mol_type = other RNA
ctcctccacgctcccgcccc

SEQ ID NO: 6549 - RNA, 20 nt, synthetic construct
  source 1..20: mol_type = other RNA
ctcctccctggcccctcaca

SEQ ID NO: 6550 - RNA, 20 nt, synthetic construct
  source 1..20: mol_type = other RNA
ctccttttccacctgttgga

SEQ ID NO: 6551 - RNA, 20 nt, synthetic construct
  source 1..20: mol_type = other RNA
ctctaaggctgagtgtaagt

SEQ ID NO: 6552 - RNA, 20 nt, synthetic construct
  source 1..20: mol_type = other RNA
ctctaggaccttatggccct

SEQ ID NO: 6553 - RNA, 20 nt, synthetic construct
  source 1..20: mol_type = other RNA
ctgagtgtaagtgcggggcg

SEQ ID NO: 6554 - RNA, 20 nt, synthetic construct
  source 1..20: mol_type = other RNA
ctgcctcctccctggcccct

SEQ ID NO: 6555 - RNA, 20 nt, synthetic construct
  source 1..20: mol_type = other RNA
ctggcccctcacaggacatt

SEQ ID NO: 6556 - RNA, 20 nt, synthetic construct
  source 1..20: mol_type = other RNA
ctgtgaggggccagggagga

SEQ ID NO: 6557 - RNA, 20 nt, synthetic construct
  source 1..20: mol_type = other RNA
ctgttggaagaaaatgtcct

SEQ ID NO: 6558 - RNA, 20 nt, synthetic construct
  source 1..20: mol_type = other RNA
cttacactcagccttagagt

SEQ ID NO: 6559 - RNA, 20 nt, synthetic construct
  source 1..20: mol_type = other RNA
cttagagtagctccctcctt

SEQ ID NO: 6560 - RNA, 20 nt, synthetic construct
  source 1..20: mol_type = other RNA
cttatggccctgcctcctcc

SEQ ID NO: 6561 - RNA, 20 nt, synthetic construct
  source 1..20: mol_type = other RNA
cttccaacaggtggaaaagg

SEQ ID NO: 6562 - RNA, 20 nt, synthetic construct
  source 1..20: mol_type = other RNA
cttttccacctgttggaaga

SEQ ID NO: 6563 - RNA, 20 nt, synthetic construct
  source 1..20: mol_type = other RNA
gaaaaggagggagctactct

SEQ ID NO: 6564 - RNA, 20 nt, synthetic construct
  source 1..20: mol_type = other RNA
gaaaatgtcctgtgaggggc

SEQ ID NO: 6565 - RNA, 20 nt, synthetic construct
  source 1..20: mol_type = other RNA
gaagaaaatgtcctgtgagg

SEQ ID NO: 6566 - RNA, 20 nt, synthetic construct
  source 1..20: mol_type = other RNA
gacattttcttccaacaggt

SEQ ID NO: 6567 - RNA, 20 nt, synthetic construct
  source 1..20: mol_type = other RNA
gaccttatggccctgcctcc

SEQ ID NO: 6568 - RNA, 20 nt, synthetic construct
  source 1..20: mol_type = other RNA
gagctactctaaggctgagt

SEQ ID NO: 6569 - RNA, 20 nt, synthetic construct
  source 1..20: mol_type = other RNA
gagctcctccacgctcccgc

SEQ ID NO: 6570 - RNA, 20 nt, synthetic construct
  source 1..20: mol_type = other RNA
gaggaggcagggccataagg

SEQ ID NO: 6571 - RNA, 20 nt, synthetic construct
  source 1..20: mol_type = other RNA
gaggcagggccataaggtcc

SEQ ID NO: 6572 - RNA, 20 nt, synthetic construct
  source 1..20: mol_type = other RNA
gagggagctactctaaggct

SEQ ID NO: 6573 - RNA, 20 nt, synthetic construct
  source 1..20: mol_type = other RNA
gaggggccagggaggaggca

SEQ ID NO: 6574 - RNA, 20 nt, synthetic construct
  source 1..20: mol_type = other RNA
gagtagctccctccttttcc

SEQ ID NO: 6575 - RNA, 20 nt, synthetic construct
  source 1..20: mol_type = other RNA
gagtgtaagtgcggggcggg

SEQ ID NO: 6576 - RNA, 20 nt, synthetic construct
  source 1..20: mol_type = other RNA
gcacttacactcagccttag

SEQ ID NO: 6577 - RNA, 20 nt, synthetic construct
  source 1..20: mol_type = other RNA
gcagggccataaggtcctag

SEQ ID NO: 6578 - RNA, 20 nt, synthetic construct
  source 1..20: mol_type = other RNA
gccagggaggaggcagggcc

SEQ ID NO: 6579 - RNA, 20 nt, synthetic construct
  source 1..20: mol_type = other RNA
gccccgcacttacactcagc

SEQ ID NO: 6580 - RNA, 20 nt, synthetic construct
  source 1..20: mol_type = other RNA
gcccctcacaggacattttc

SEQ ID NO: 6581 - RNA, 20 nt, synthetic construct
  source 1..20: mol_type = other RNA
gccctgcctcctccctggcc

SEQ ID NO: 6582 - RNA, 20 nt, synthetic construct
  source 1..20: mol_type = other RNA
gcctcctccctggcccctca

SEQ ID NO: 6583 - RNA, 20 nt, synthetic construct
  source 1..20: mol_type = other RNA
gccttagagtagctccctcc

SEQ ID NO: 6584 - RNA, 20 nt, synthetic construct
  source 1..20: mol_type = other RNA
gcgagctcctccacgctccc

SEQ ID NO: 6585 - RNA, 20 nt, synthetic construct
  source 1..20: mol_type = other RNA
gctactctaaggctgagtgt

SEQ ID NO: 6586 - RNA, 20 nt, synthetic construct
  source 1..20: mol_type = other RNA
gctcccgccccgcacttaca

SEQ ID NO: 6587 - RNA, 20 nt, synthetic construct
  source 1..20: mol_type = other RNA
gctccctccttttccacctg

SEQ ID NO: 6588 - RNA, 20 nt, synthetic construct
  source 1..20: mol_type = other RNA
gctcctccacgctcccgccc

SEQ ID NO: 6589 - RNA, 20 nt, synthetic construct
  source 1..20: mol_type = other RNA
gctgagtgtaagtgcggggc

SEQ ID NO: 6590 - RNA, 20 nt, synthetic construct
  source 1..20: mol_type = other RNA
ggaaaaggagggagctactc

SEQ ID NO: 6591 - RNA, 20 nt, synthetic construct
  source 1..20: mol_type = other RNA
ggaagaaaatgtcctgtgag

SEQ ID NO: 6592 - RNA, 20 nt, synthetic construct
  source 1..20: mol_type = other RNA
ggacattttcttccaacagg

SEQ ID NO: 6593 - RNA, 20 nt, synthetic construct
  source 1..20: mol_type = other RNA
ggaccttatggccctgcctc

SEQ ID NO: 6594 - RNA, 20 nt, synthetic construct
  source 1..20: mol_type = other RNA
ggagctactctaaggctgag

SEQ ID NO: 6595 - RNA, 20 nt, synthetic construct
  source 1..20: mol_type = other RNA
ggaggaggcagggccataag

SEQ ID NO: 6596 - RNA, 20 nt, synthetic construct
  source 1..20: mol_type = other RNA
ggaggcagggccataaggtc

SEQ ID NO: 6597 - RNA, 20 nt, synthetic construct
  source 1..20: mol_type = other RNA
ggagggagctactctaaggc

SEQ ID NO: 6598 - RNA, 20 nt, synthetic construct
  source 1..20: mol_type = other RNA
ggcagggccataaggtccta

SEQ ID NO: 6599 - RNA, 20 nt, synthetic construct
  source 1..20: mol_type = other RNA
ggccagggaggaggcagggc

SEQ ID NO: 6600 - RNA, 20 nt, synthetic construct
  source 1..20: mol_type = other RNA
ggcccctcacaggacatttt

SEQ ID NO: 6601 - RNA, 20 nt, synthetic construct
  source 1..20: mol_type = other RNA
ggccctgcctcctccctggc

SEQ ID NO: 6602 - RNA, 20 nt, synthetic construct
  source 1..20: mol_type = other RNA
ggcgagctcctccacgctcc

SEQ ID NO: 6603 - RNA, 20 nt, synthetic construct
  source 1..20: mol_type = other RNA
ggcgggagcgtggaggagct

SEQ ID NO: 6604 - RNA, 20 nt, synthetic construct
  source 1..20: mol_type = other RNA
ggctgagtgtaagtgcgggg

SEQ ID NO: 6605 - RNA, 20 nt, synthetic construct
  source 1..20: mol_type = other RNA
gggagctactctaaggctga

SEQ ID NO: 6606 - RNA, 20 nt, synthetic construct
  source 1..20: mol_type = other RNA
gggaggaggcagggccataa

SEQ ID NO: 6607 - RNA, 20 nt, synthetic construct
  source 1..20: mol_type = other RNA
gggccagggaggaggcaggg

SEQ ID NO: 6608 - RNA, 20 nt, synthetic construct
  source 1..20: mol_type = other RNA
gggccataaggtcctagagg

SEQ ID NO: 6609 - RNA, 20 nt, synthetic construct
  source 1..20: mol_type = other RNA
gggcgagctcctccacgctc

SEQ ID NO: 6610 - RNA, 20 nt, synthetic construct
  source 1..20: mol_type = other RNA
gggcgggagcgtggaggagc

SEQ ID NO: 6611 - RNA, 20 nt, synthetic construct
  source 1..20: mol_type = other RNA
ggggccagggaggaggcagg

SEQ ID NO: 6612 - RNA, 20 nt, synthetic construct
  source 1..20: mol_type = other RNA
ggggcgggagcgtggaggag

SEQ ID NO: 6613 - RNA, 20 nt, synthetic construct
  source 1..20: mol_type = other RNA
ggtggaaaaggagggagcta

SEQ ID NO: 6614 - RNA, 20 nt, synthetic construct
  source 1..20: mol_type = other RNA
ggtgggcgagctcctccacg

SEQ ID NO: 6615 - RNA, 20 nt, synthetic construct
  source 1..20: mol_type = other RNA
ggttcctctaggaccttatg

SEQ ID NO: 6616 - RNA, 20 nt, synthetic construct
  source 1..20: mol_type = other RNA
gtaagtgcggggcgggagcg

SEQ ID NO: 6617 - RNA, 20 nt, synthetic construct
  source 1..20: mol_type = other RNA
gtagctccctccttttccac

SEQ ID NO: 6618 - RNA, 20 nt, synthetic construct
  source 1..20: mol_type = other RNA
gtcctgtgaggggccaggga

SEQ ID NO: 6619 - RNA, 20 nt, synthetic construct
  source 1..20: mol_type = other RNA
gtgaggggccagggaggagg

SEQ ID NO: 6620 - RNA, 20 nt, synthetic construct
  source 1..20: mol_type = other RNA
gtgcggggcgggagcgtgga

SEQ ID NO: 6621 - RNA, 20 nt, synthetic construct
  source 1..20: mol_type = other RNA
gtggaaaaggagggagctac

SEQ ID NO: 6622 - RNA, 20 nt, synthetic construct
  source 1..20: mol_type = other RNA
gtgggcgagctcctccacgc

SEQ ID NO: 6623 - RNA, 20 nt, synthetic construct
  source 1..20: mol_type = other RNA
gtgtaagtgcggggcgggag

SEQ ID NO: 6624 - RNA, 20 nt, synthetic construct
  source 1..20: mol_type = other RNA
gttcctctaggaccttatgg

SEQ ID NO: 6625 - RNA, 20 nt, synthetic construct
  source 1..20: mol_type = other RNA
gttggaagaaaatgtcctgt

SEQ ID NO: 6626 - RNA, 20 nt, synthetic construct
  source 1..20: mol_type = other RNA
taaggctgagtgtaagtgcg

SEQ ID NO: 6627 - RNA, 20 nt, synthetic construct
  source 1..20: mol_type = other RNA
taagtgcggggcgggagcgt

SEQ ID NO: 6628 - RNA, 20 nt, synthetic construct
  source 1..20: mol_type = other RNA
tacactcagccttagagtag

SEQ ID NO: 6629 - RNA, 20 nt, synthetic construct
  source 1..20: mol_type = other RNA
tactctaaggctgagtgtaa

SEQ ID NO: 6630 - RNA, 20 nt, synthetic construct
  source 1..20: mol_type = other RNA
tagagtagctccctcctttt

SEQ ID NO: 6631 - RNA, 20 nt, synthetic construct
  source 1..20: mol_type = other RNA
tagctccctccttttccacc

SEQ ID NO: 6632 - RNA, 20 nt, synthetic construct
  source 1..20: mol_type = other RNA
taggaccttatggccctgcc

SEQ ID NO: 6633 - RNA, 20 nt, synthetic construct
  source 1..20: mol_type = other RNA
tatggccctgcctcctccct

SEQ ID NO: 6634 - RNA, 20 nt, synthetic construct
  source 1..20: mol_type = other RNA
tcacaggacattttcttcca

SEQ ID NO: 6635 - RNA, 20 nt, synthetic construct
  source 1..20: mol_type = other RNA
tcagccttagagtagctccc

SEQ ID NO: 6636 - RNA, 20 nt, synthetic construct
  source 1..20: mol_type = other RNA
tccaacaggtggaaaaggag

SEQ ID NO: 6637 - RNA, 20 nt, synthetic construct
  source 1..20: mol_type = other RNA
tccacctgttggaagaaaat

SEQ ID NO: 6638 - RNA, 20 nt, synthetic construct
  source 1..20: mol_type = other RNA
tccacgctcccgccccgcac

SEQ ID NO: 6639 - RNA, 20 nt, synthetic construct
  source 1..20: mol_type = other RNA
tcccgccccgcacttacact

SEQ ID NO: 6640 - RNA, 20 nt, synthetic construct
  source 1..20: mol_type = other RNA
tccctccttttccacctgtt

SEQ ID NO: 6641 - RNA, 20 nt, synthetic construct
  source 1..20: mol_type = other RNA
tccctggcccctcacaggac

SEQ ID NO: 6642 - RNA, 20 nt, synthetic construct
  source 1..20: mol_type = other RNA
tcctccacgctcccgccccg

SEQ ID NO: 6643 - RNA, 20 nt, synthetic construct
  source 1..20: mol_type = other RNA
tcctccctggcccctcacag

SEQ ID NO: 6644 - RNA, 20 nt, synthetic construct
  source 1..20: mol_type = other RNA
tcctctaggaccttatggcc

SEQ ID NO: 6645 - RNA, 20 nt, synthetic construct
  source 1..20: mol_type = other RNA
tcctgtgaggggccagggag

SEQ ID NO: 6646 - RNA, 20 nt, synthetic construct
  source 1..20: mol_type = other RNA
tccttttccacctgttggaa

SEQ ID NO: 6647 - RNA, 20 nt, synthetic construct
  source 1..20: mol_type = other RNA
tctaaggctgagtgtaagtg

SEQ ID NO: 6648 - RNA, 20 nt, synthetic construct
  source 1..20: mol_type = other RNA
tctaggaccttatggccctg

SEQ ID NO: 6649 - RNA, 20 nt, synthetic construct
  source 1..20: mol_type = other RNA
tcttccaacaggtggaaaag

SEQ ID NO: 6650 - RNA, 20 nt, synthetic construct
  source 1..20: mol_type = other RNA
tgaggggccagggaggaggc

SEQ ID NO: 6651 - RNA, 20 nt, synthetic construct
  source 1..20: mol_type = other RNA
tgagtgtaagtgcggggcgg

SEQ ID NO: 6652 - RNA, 20 nt, synthetic construct
  source 1..20: mol_type = other RNA
tgcctcctccctggcccctc

SEQ ID NO: 6653 - RNA, 20 nt, synthetic construct
  source 1..20: mol_type = other RNA
tgcggggcgggagcgtggag

SEQ ID NO: 6654 - RNA, 20 nt, synthetic construct
  source 1..20: mol_type = other RNA
tggaaaaggagggagctact

SEQ ID NO: 6655 - RNA, 20 nt, synthetic construct
  source 1..20: mol_type = other RNA
tggaagaaaatgtcctgtga

SEQ ID NO: 6656 - RNA, 20 nt, synthetic construct
  source 1..20: mol_type = other RNA
tggcccctcacaggacattt

SEQ ID NO: 6657 - RNA, 20 nt, synthetic construct
  source 1..20: mol_type = other RNA
tggccctgcctcctccctgg

SEQ ID NO: 6658 - RNA, 20 nt, synthetic construct
  source 1..20: mol_type = other RNA
tgggcgagctcctccacgct

SEQ ID NO: 6659 - RNA, 20 nt, synthetic construct
  source 1..20: mol_type = other RNA
tgtaagtgcggggcgggagc

SEQ ID NO: 6660 - RNA, 20 nt, synthetic construct
  source 1..20: mol_type = other RNA
tgtcctgtgaggggccaggg

SEQ ID NO: 6661 - RNA, 20 nt, synthetic construct
  source 1..20: mol_type = other RNA
tgtgaggggccagggaggag

SEQ ID NO: 6662 - RNA, 20 nt, synthetic construct
  source 1..20: mol_type = other RNA
tgttggaagaaaatgtcctg

SEQ ID NO: 6663 - RNA, 20 nt, synthetic construct
  source 1..20: mol_type = other RNA
ttacactcagccttagagta

SEQ ID NO: 6664 - RNA, 20 nt, synthetic construct
  source 1..20: mol_type = other RNA
ttagagtagctccctccttt

SEQ ID NO: 6665 - RNA, 20 nt, synthetic construct
  source 1..20: mol_type = other RNA
ttatggccctgcctcctccc

SEQ ID NO: 6666 - RNA, 20 nt, synthetic construct
  source 1..20: mol_type = other RNA
ttccaacaggtggaaaagga

SEQ ID NO: 6667 - RNA, 20 nt, synthetic construct
  source 1..20: mol_type = other RNA
ttccacctgttggaagaaaa

SEQ ID NO: 6668 - RNA, 20 nt, synthetic construct
  source 1..20: mol_type = other RNA
ttcctctaggaccttatggc

SEQ ID NO: 6669 - RNA, 20 nt, synthetic construct
  source 1..20: mol_type = other RNA
ttcttccaacaggtggaaaa

SEQ ID NO: 6670 - RNA, 20 nt, synthetic construct
  source 1..20: mol_type = other RNA
ttggaagaaaatgtcctgtg

SEQ ID NO: 6671 - RNA, 20 nt, synthetic construct
  source 1..20: mol_type = other RNA
tttccacctgttggaagaaa

SEQ ID NO: 6672 - RNA, 20 nt, synthetic construct
  source 1..20: mol_type = other RNA
tttcttccaacaggtggaaa

SEQ ID NO: 6673 - RNA, 20 nt, synthetic construct
  source 1..20: mol_type = other RNA
ttttccacctgttggaagaa

SEQ ID NO: 6674 - RNA, 20 nt, synthetic construct
  source 1..20: mol_type = other RNA
ttttcttccaacaggtggaa

SEQ ID NO: 6675 - RNA, 21 nt, synthetic construct
  source 1..21: mol_type = other RNA
aaaaggagggagctactctaa

SEQ ID NO: 6676 - RNA, 21 nt, synthetic construct
  source 1..21: mol_type = other RNA
aaaatgtcctgtgaggggcca

SEQ ID NO: 6677 - RNA, 21 nt, synthetic construct
  source 1..21: mol_type = other RNA
aaaggagggagctactctaag

SEQ ID NO: 6678 - RNA, 21 nt, synthetic construct
  source 1..21: mol_type = other RNA
aaatgtcctgtgaggggccag

SEQ ID NO: 6679 - RNA, 21 nt, synthetic construct
  source 1..21: mol_type = other RNA
aacaggtggaaaaggagggag

SEQ ID NO: 6680 - RNA, 21 nt, synthetic construct
  source 1..21: mol_type = other RNA
aagaaaatgtcctgtgagggg

SEQ ID NO: 6681 - RNA, 21 nt, synthetic construct
  source 1..21: mol_type = other RNA
aaggagggagctactctaagg

SEQ ID NO: 6682 - RNA, 21 nt, synthetic construct
  source 1..21: mol_type = other RNA
aaggctgagtgtaagtgcggg

SEQ ID NO: 6683 - RNA, 21 nt, synthetic construct
  source 1..21: mol_type = other RNA
aagtgcggggcgggagcgtgg

SEQ ID NO: 6684 - RNA, 21 nt, synthetic construct
  source 1..21: mol_type = other RNA
aatgtcctgtgaggggccagg

SEQ ID NO: 6685 - RNA, 21 nt, synthetic construct
  source 1..21: mol_type = other RNA
acactcagccttagagtagct

SEQ ID NO: 6686 - RNA, 21 nt, synthetic construct
  source 1..21: mol_type = other RNA
acaggacattttcttccaaca

SEQ ID NO: 6687 - RNA, 21 nt, synthetic construct
  source 1..21: mol_type = other RNA
acaggtggaaaaggagggagc

SEQ ID NO: 6688 - RNA, 21 nt, synthetic construct
  source 1..21: mol_type = other RNA
acattttcttccaacaggtgg

SEQ ID NO: 6689 - RNA, 21 nt, synthetic construct
  source 1..21: mol_type = other RNA
acctgttggaagaaaatgtcc

SEQ ID NO: 6690 - RNA, 21 nt, synthetic construct
  source 1..21: mol_type = other RNA
accttatggccctgcctcctc

SEQ ID NO: 6691 - RNA, 21 nt, synthetic construct
  source 1..21: mol_type = other RNA
acgctcccgccccgcacttac

SEQ ID NO: 6692 - RNA, 21 nt, synthetic construct
  source 1..21: mol_type = other RNA
actcagccttagagtagctcc

SEQ ID NO: 6693 - RNA, 21 nt, synthetic construct
  source 1..21: mol_type = other RNA
actctaaggctgagtgtaagt

SEQ ID NO: 6694 - RNA, 21 nt, synthetic construct
  source 1..21: mol_type = other RNA
acttacactcagccttagagt

SEQ ID NO: 6695 - RNA, 21 nt, synthetic construct
  source 1..21: mol_type = other RNA
agaaaatgtcctgtgaggggc

SEQ ID NO: 6696 - RNA, 21 nt, synthetic construct
  source 1..21: mol_type = other RNA
agagtagctccctccttttcc

SEQ ID NO: 6697 - RNA, 21 nt, synthetic construct
  source 1..21: mol_type = other RNA
agccttagagtagctccctcc

SEQ ID NO: 6698 - RNA, 21 nt, synthetic construct
  source 1..21: mol_type = other RNA
agctactctaaggctgagtgt

SEQ ID NO: 6699 - RNA, 21 nt, synthetic construct
  source 1..21: mol_type = other RNA
agctccctccttttccacctg

SEQ ID NO: 6700 - RNA, 21 nt, synthetic construct
  source 1..21: mol_type = other RNA
agctcctccacgctcccgccc

SEQ ID NO: 6701 - RNA, 21 nt, synthetic construct
  source 1..21: mol_type = other RNA
aggacattttcttccaacagg

SEQ ID NO: 6702 - RNA, 21 nt, synthetic construct
  source 1..21: mol_type = other RNA
aggaccttatggccctgcctc

SEQ ID NO: 6703 - RNA, 21 nt, synthetic construct
  source 1..21: mol_type = other RNA
aggaggcagggccataaggtc

SEQ ID NO: 6704 - RNA, 21 nt, synthetic construct
  source 1..21: mol_type = other RNA
aggagggagctactctaaggc

SEQ ID NO: 6705 - RNA, 21 nt, synthetic construct
  source 1..21: mol_type = other RNA
aggaggttcctctaggacctt

SEQ ID NO: 6706 - RNA, 21 nt, synthetic construct
  source 1..21: mol_type = other RNA
aggcagggccataaggtccta

SEQ ID NO: 6707 - RNA, 21 nt, synthetic construct
  source 1..21: mol_type = other RNA
aggctgagtgtaagtgcgggg

SEQ ID NO: 6708 - RNA, 21 nt, synthetic construct
  source 1..21: mol_type = other RNA
agggagctactctaaggctga

SEQ ID NO: 6709 - RNA, 21 nt, synthetic construct
  source 1..21: mol_type = other RNA
agggaggaggcagggccataa

SEQ ID NO: 6710 - RNA, 21 nt, synthetic construct
  source 1..21: mol_type = other RNA
agggccataaggtcctagagg

SEQ ID NO: 6711 - RNA, 21 nt, synthetic construct
  source 1..21: mol_type = other RNA
aggggccagggaggaggcagg

SEQ ID NO: 6712 - RNA, 21 nt, synthetic construct
  source 1..21: mol_type = other RNA
aggtggaaaaggagggagcta

SEQ ID NO: 6713 - RNA, 21 nt, synthetic construct
  source 1..21: mol_type = other RNA
aggttcctctaggaccttatg

SEQ ID NO: 6714 - RNA, 21 nt, synthetic construct
  source 1..21: mol_type = other RNA
agtagctccctccttttccac

SEQ ID NO: 6715 - RNA, 21 nt, synthetic construct
  source 1..21: mol_type = other RNA
agtgcggggcgggagcgtgga

SEQ ID NO: 6716 - RNA, 21 nt, synthetic construct
  source 1..21: mol_type = other RNA
agtgtaagtgcggggcgggag

SEQ ID NO: 6717 - RNA, 21 nt, synthetic construct
  source 1..21: mol_type = other RNA
atggccctgcctcctccctgg

SEQ ID NO: 6718 - RNA, 21 nt, synthetic construct
  source 1..21: mol_type = other RNA
atgtcctgtgaggggccaggg

SEQ ID NO: 6719 - RNA, 21 nt, synthetic construct
  source 1..21: mol_type = other RNA
attttcttccaacaggtggaa

SEQ ID NO: 6720 - RNA, 21 nt, synthetic construct
  source 1..21: mol_type = other RNA
caacaggtggaaaaggaggga

SEQ ID NO: 6721 - RNA, 21 nt, synthetic construct
  source 1..21: mol_type = other RNA
cacaggacattttcttccaac

SEQ ID NO: 6722 - RNA, 21 nt, synthetic construct
  source 1..21: mol_type = other RNA
cacctgttggaagaaaatgtc

SEQ ID NO: 6723 - RNA, 21 nt, synthetic construct
  source 1..21: mol_type = other RNA
cacgctcccgccccgcactta

SEQ ID NO: 6724 - RNA, 21 nt, synthetic construct
  source 1..21: mol_type = other RNA
cactcagccttagagtagctc

SEQ ID NO: 6725 - RNA, 21 nt, synthetic construct
  source 1..21: mol_type = other RNA
cacttacactcagccttagag

SEQ ID NO: 6726 - RNA, 21 nt, synthetic construct
  source 1..21: mol_type = other RNA
cagccttagagtagctccctc

SEQ ID NO: 6727 - RNA, 21 nt, synthetic construct
  source 1..21: mol_type = other RNA
caggacattttcttccaacag

SEQ ID NO: 6728 - RNA, 21 nt, synthetic construct
  source 1..21: mol_type = other RNA
cagggaggaggcagggccata

SEQ ID NO: 6729 - RNA, 21 nt, synthetic construct
  source 1..21: mol_type = other RNA
caggtggaaaaggagggagct

SEQ ID NO: 6730 - RNA, 21 nt, synthetic construct
  source 1..21: mol_type = other RNA
cattttcttccaacaggtgga

SEQ ID NO: 6731 - RNA, 21 nt, synthetic construct
  source 1..21: mol_type = other RNA
ccaacaggtggaaaaggaggg

SEQ ID NO: 6732 - RNA, 21 nt, synthetic construct
  source 1..21: mol_type = other RNA
ccacctgttggaagaaaatgt

SEQ ID NO: 6733 - RNA, 21 nt, synthetic construct
  source 1..21: mol_type = other RNA
ccacgctcccgccccgcactt

SEQ ID NO: 6734 - RNA, 21 nt, synthetic construct
  source 1..21: mol_type = other RNA
ccagggaggaggcagggccat

SEQ ID NO: 6735 - RNA, 21 nt, synthetic construct
  source 1..21: mol_type = other RNA
ccccgcacttacactcagcct

SEQ ID NO: 6736 - RNA, 21 nt, synthetic construct
  source 1..21: mol_type = other RNA
cccctcacaggacattttctt

SEQ ID NO: 6737 - RNA, 21 nt, synthetic construct
  source 1..21: mol_type = other RNA
cccgcacttacactcagcctt

SEQ ID NO: 6738 - RNA, 21 nt, synthetic construct
  source 1..21: mol_type = other RNA
cccgccccgcacttacactca

SEQ ID NO: 6739 - RNA, 21 nt, synthetic construct
  source 1..21: mol_type = other RNA
ccctcacaggacattttcttc

SEQ ID NO: 6740 - RNA, 21 nt, synthetic construct
  source 1..21: mol_type = other RNA
ccctccttttccacctgttgg

SEQ ID NO: 6741 - RNA, 21 nt, synthetic construct
  source 1..21: mol_type = other RNA
ccctggcccctcacaggacat

SEQ ID NO: 6742 - RNA, 21 nt, synthetic construct
  source 1..21: mol_type = other RNA
ccgcacttacactcagcctta

SEQ ID NO: 6743 - RNA, 21 nt, synthetic construct
  source 1..21: mol_type = other RNA
ccgccccgcacttacactcag

SEQ ID NO: 6744 - RNA, 21 nt, synthetic construct
  source 1..21: mol_type = other RNA
cctcacaggacattttcttcc

SEQ ID NO: 6745 - RNA, 21 nt, synthetic construct
  source 1..21: mol_type = other RNA
cctccctggcccctcacagga

SEQ ID NO: 6746 - RNA, 21 nt, synthetic construct
  source 1..21: mol_type = other RNA
cctcctccctggcccctcaca

SEQ ID NO: 6747 - RNA, 21 nt, synthetic construct
  source 1..21: mol_type = other RNA
cctccttttccacctgttgga

SEQ ID NO: 6748 - RNA, 21 nt, synthetic construct
  source 1..21: mol_type = other RNA
cctctaggaccttatggccct

SEQ ID NO: 6749 - RNA, 21 nt, synthetic construct
  source 1..21: mol_type = other RNA
cctgcctcctccctggcccct

SEQ ID NO: 6750 - RNA, 21 nt, synthetic construct
  source 1..21: mol_type = other RNA
cctggcccctcacaggacatt

SEQ ID NO: 6751 - RNA, 21 nt, synthetic construct
  source 1..21: mol_type = other RNA
cctgtgaggggccagggagga

SEQ ID NO: 6752 - RNA, 21 nt, synthetic construct
  source 1..21: mol_type = other RNA
cctgttggaagaaaatgtcct

SEQ ID NO: 6753 - RNA, 21 nt, synthetic construct
  source 1..21: mol_type = other RNA
ccttagagtagctccctcctt

SEQ ID NO: 6754 - RNA, 21 nt, synthetic construct
  source 1..21: mol_type = other RNA
ccttatggccctgcctcctcc

SEQ ID NO: 6755 - RNA, 21 nt, synthetic construct
  source 1..21: mol_type = other RNA
ccttttccacctgttggaaga

SEQ ID NO: 6756 - RNA, 21 nt, synthetic construct
  source 1..21: mol_type = other RNA
cgagctcctccacgctcccgc

SEQ ID NO: 6757 - RNA, 21 nt, synthetic construct
  source 1..21: mol_type = other RNA
cgcacttacactcagccttag

SEQ ID NO: 6758 - RNA, 21 nt, synthetic construct
  source 1..21: mol_type = other RNA
cgccccgcacttacactcagc

SEQ ID NO: 6759 - RNA, 21 nt, synthetic construct
  source 1..21: mol_type = other RNA
cgctcccgccccgcacttaca

SEQ ID NO: 6760 - RNA, 21 nt, synthetic construct
  source 1..21: mol_type = other RNA
ctaaggctgagtgtaagtgcg

SEQ ID NO: 6761 - RNA, 21 nt, synthetic construct
  source 1..21: mol_type = other RNA
ctactctaaggctgagtgtaa

SEQ ID NO: 6762 - RNA, 21 nt, synthetic construct
  source 1..21: mol_type = other RNA
ctaggaccttatggccctgcc

SEQ ID NO: 6763 - RNA, 21 nt, synthetic construct
  source 1..21: mol_type = other RNA
ctcacaggacattttcttcca

SEQ ID NO: 6764 - RNA, 21 nt, synthetic construct
  source 1..21: mol_type = other RNA
ctcagccttagagtagctccc

SEQ ID NO: 6765 - RNA, 21 nt, synthetic construct
  source 1..21: mol_type = other RNA
ctcccgccccgcacttacact

SEQ ID NO: 6766 - RNA, 21 nt, synthetic construct
  source 1..21: mol_type = other RNA
ctccctccttttccacctgtt

SEQ ID NO: 6767 - RNA, 21 nt, synthetic construct
  source 1..21: mol_type = other RNA
ctccctggcccctcacaggac

SEQ ID NO: 6768 - RNA, 21 nt, synthetic construct
  source 1..21: mol_type = other RNA
ctcctccctggcccctcacag

SEQ ID NO: 6769 - RNA, 21 nt, synthetic construct
  source 1..21: mol_type = other RNA
ctccttttccacctgttggaa

SEQ ID NO: 6770 - RNA, 21 nt, synthetic construct
  source 1..21: mol_type = other RNA
ctctaaggctgagtgtaagtg

SEQ ID NO: 6771 - RNA, 21 nt, synthetic construct
  source 1..21: mol_type = other RNA
ctctaggaccttatggccctg

SEQ ID NO: 6772 - RNA, 21 nt, synthetic construct
  source 1..21: mol_type = other RNA
ctgagtgtaagtgcggggcgg

SEQ ID NO: 6773 - RNA, 21 nt, synthetic construct
  source 1..21: mol_type = other RNA
ctgcctcctccctggcccctc

SEQ ID NO: 6774 - RNA, 21 nt, synthetic construct
  source 1..21: mol_type = other RNA
ctggcccctcacaggacattt

SEQ ID NO: 6775 - RNA, 21 nt, synthetic construct
  source 1..21: mol_type = other RNA
ctgtgaggggccagggaggag

SEQ ID NO: 6776 - RNA, 21 nt, synthetic construct
  source 1..21: mol_type = other RNA
ctgttggaagaaaatgtcctg

SEQ ID NO: 6777 - RNA, 21 nt, synthetic construct
  source 1..21: mol_type = other RNA
cttacactcagccttagagta

SEQ ID NO: 6778 - RNA, 21 nt, synthetic construct
  source 1..21: mol_type = other RNA
cttagagtagctccctccttt

SEQ ID NO: 6779 - RNA, 21 nt, synthetic construct
  source 1..21: mol_type = other RNA
cttatggccctgcctcctccc

SEQ ID NO: 6780 - RNA, 21 nt, synthetic construct
  source 1..21: mol_type = other RNA
cttccaacaggtggaaaagga

SEQ ID NO: 6781 - RNA, 21 nt, synthetic construct
  source 1..21: mol_type = other RNA
cttttccacctgttggaagaa

SEQ ID NO: 6782 - RNA, 21 nt, synthetic construct
  source 1..21: mol_type = other RNA
gaaaaggagggagctactcta

SEQ ID NO: 6783 - RNA, 21 nt, synthetic construct
  source 1..21: mol_type = other RNA
gaaaatgtcctgtgaggggcc

SEQ ID NO: 6784 - RNA, 21 nt, synthetic construct
  source 1..21: mol_type = other RNA
gaagaaaatgtcctgtgaggg

SEQ ID NO: 6785 - RNA, 21 nt, synthetic construct
  source 1..21: mol_type = other RNA
gacattttcttccaacaggtg

SEQ ID NO: 6786 - RNA, 21 nt, synthetic construct
  source 1..21: mol_type = other RNA
gaccttatggccctgcctcct

SEQ ID NO: 6787 - RNA, 21 nt, synthetic construct
  source 1..21: mol_type = other RNA
gagctactctaaggctgagtg

SEQ ID NO: 6788 - RNA, 21 nt, synthetic construct
  source 1..21: mol_type = other RNA
gagctcctccacgctcccgcc

SEQ ID NO: 6789 - RNA, 21 nt, synthetic construct
  source 1..21: mol_type = other RNA
gaggaggcagggccataaggt

SEQ ID NO: 6790 - RNA, 21 nt, synthetic construct
  source 1..21: mol_type = other RNA
gaggcagggccataaggtcct

SEQ ID NO: 6791 - RNA, 21 nt, synthetic construct
  source 1..21: mol_type = other RNA
gagggagctactctaaggctg

SEQ ID NO: 6792 - RNA, 21 nt, synthetic construct
  source 1..21: mol_type = other RNA
gaggggccagggaggaggcag

SEQ ID NO: 6793 - RNA, 21 nt, synthetic construct
  source 1..21: mol_type = other RNA
gaggttcctctaggaccttat

SEQ ID NO: 6794 - RNA, 21 nt, synthetic construct
  source 1..21: mol_type = other RNA
gagtagctccctccttttcca

SEQ ID NO: 6795 - RNA, 21 nt, synthetic construct
  source 1..21: mol_type = other RNA
gagtgtaagtgcggggcggga

SEQ ID NO: 6796 - RNA, 21 nt, synthetic construct
  source 1..21: mol_type = other RNA
gcacttacactcagccttaga

SEQ ID NO: 6797 - RNA, 21 nt, synthetic construct
  source 1..21: mol_type = other RNA
gcagggccataaggtcctaga

SEQ ID NO: 6798 - RNA, 21 nt, synthetic construct
  source 1..21: mol_type = other RNA
gccagggaggaggcagggcca

SEQ ID NO: 6799 - RNA, 21 nt, synthetic construct
  source 1..21: mol_type = other RNA
gccccgcacttacactcagcc

SEQ ID NO: 6800 - RNA, 21 nt, synthetic construct
  source 1..21: mol_type = other RNA
gcccctcacaggacattttct

SEQ ID NO: 6801 - RNA, 21 nt, synthetic construct
  source 1..21: mol_type = other RNA
gcctcctccctggcccctcac

SEQ ID NO: 6802 - RNA, 21 nt, synthetic construct
  source 1..21: mol_type = other RNA
gccttagagtagctccctcct

SEQ ID NO: 6803 - RNA, 21 nt, synthetic construct
  source 1..21: mol_type = other RNA
gcgagctcctccacgctcccg

SEQ ID NO: 6804 - RNA, 21 nt, synthetic construct
  source 1..21: mol_type = other RNA
gctactctaaggctgagtgta

SEQ ID NO: 6805 - RNA, 21 nt, synthetic construct
  source 1..21: mol_type = other RNA
gctcccgccccgcacttacac

SEQ ID NO: 6806 - RNA, 21 nt, synthetic construct
  source 1..21: mol_type = other RNA
gctccctccttttccacctgt

SEQ ID NO: 6807 - RNA, 21 nt, synthetic construct
  source 1..21: mol_type = other RNA
gctgagtgtaagtgcggggcg

SEQ ID NO: 6808 - RNA, 21 nt, synthetic construct
  source 1..21: mol_type = other RNA
ggaaaaggagggagctactct

SEQ ID NO: 6809 - RNA, 21 nt, synthetic construct
  source 1..21: mol_type = other RNA
ggaagaaaatgtcctgtgagg

SEQ ID NO: 6810 - RNA, 21 nt, synthetic construct
  source 1..21: mol_type = other RNA
ggacattttcttccaacaggt

SEQ ID NO: 6811 - RNA, 21 nt, synthetic construct
  source 1..21: mol_type = other RNA
ggaccttatggccctgcctcc

SEQ ID NO: 6812 - RNA, 21 nt, synthetic construct
  source 1..21: mol_type = other RNA
ggagctactctaaggctgagt

SEQ ID NO: 6813 - RNA, 21 nt, synthetic construct
  source 1..21: mol_type = other RNA
ggaggaggcagggccataagg

SEQ ID NO: 6814 - RNA, 21 nt, synthetic construct
  source 1..21: mol_type = other RNA
ggaggcagggccataaggtcc

SEQ ID NO: 6815 - RNA, 21 nt, synthetic construct
  source 1..21: mol_type = other RNA
ggagggagctactctaaggct

SEQ ID NO: 6816 - RNA, 21 nt, synthetic construct
  source 1..21: mol_type = other RNA
ggcagggccataaggtcctag

SEQ ID NO: 6817 - RNA, 21 nt, synthetic construct
  source 1..21: mol_type = other RNA
ggcccctcacaggacattttc

SEQ ID NO: 6818 - RNA, 21 nt, synthetic construct
  source 1..21: mol_type = other RNA
ggcgagctcctccacgctccc

SEQ ID NO: 6819 - RNA, 21 nt, synthetic construct
  source 1..21: mol_type = other RNA
ggctgagtgtaagtgcggggc

SEQ ID NO: 6820 - RNA, 21 nt, synthetic construct
  source 1..21: mol_type = other RNA
gggagctactctaaggctgag

SEQ ID NO: 6821 - RNA, 21 nt, synthetic construct
  source 1..21: mol_type = other RNA
gggaggaggcagggccataag

SEQ ID NO: 6822 - RNA, 21 nt, synthetic construct
  source 1..21: mol_type = other RNA
gggcgagctcctccacgctcc

SEQ ID NO: 6823 - RNA, 21 nt, synthetic construct
  source 1..21: mol_type = other RNA
gggcgggagcgtggaggagct

SEQ ID NO: 6824 - RNA, 21 nt, synthetic construct
  source 1..21: mol_type = other RNA
ggtggaaaaggagggagctac

SEQ ID NO: 6825 - RNA, 21 nt, synthetic construct
  source 1..21: mol_type = other RNA
ggtgggcgagctcctccacgc

SEQ ID NO: 6826 - RNA, 21 nt, synthetic construct
  source 1..21: mol_type = other RNA
ggttcctctaggaccttatgg

SEQ ID NO: 6827 - RNA, 21 nt, synthetic construct
  source 1..21: mol_type = other RNA
gtaagtgcggggcgggagcgt

SEQ ID NO: 6828 - RNA, 21 nt, synthetic construct
  source 1..21: mol_type = other RNA
gtagctccctccttttccacc

SEQ ID NO: 6829 - RNA, 21 nt, synthetic construct
  source 1..21: mol_type = other RNA
gtcctgtgaggggccagggag

SEQ ID NO: 6830 - RNA, 21 nt, synthetic construct
  source 1..21: mol_type = other RNA
gtgaggggccagggaggaggc

SEQ ID NO: 6831 - RNA, 21 nt, synthetic construct
  source 1..21: mol_type = other RNA
gtggaaaaggagggagctact

SEQ ID NO: 6832 - RNA, 21 nt, synthetic construct
  source 1..21: mol_type = other RNA
gtgggcgagctcctccacgct

SEQ ID NO: 6833 - RNA, 21 nt, synthetic construct
  source 1..21: mol_type = other RNA
gtgtaagtgcggggcgggagc

SEQ ID NO: 6834 - RNA, 21 nt, synthetic construct
  source 1..21: mol_type = other RNA
gttcctctaggaccttatggc

SEQ ID NO: 6835 - RNA, 21 nt, synthetic construct
  source 1..21: mol_type = other RNA
gttggaagaaaatgtcctgtg

SEQ ID NO: 6836 - RNA, 21 nt, synthetic construct
  source 1..21: mol_type = other RNA
taaggctgagtgtaagtgcgg

SEQ ID NO: 6837 - RNA, 21 nt, synthetic construct
  source 1..21: mol_type = other RNA
taagtgcggggcgggagcgtg

SEQ ID NO: 6838 - RNA, 21 nt, synthetic construct
  source 1..21: mol_type = other RNA
tacactcagccttagagtagc

SEQ ID NO: 6839 - RNA, 21 nt, synthetic construct
  source 1..21: mol_type = other RNA
tactctaaggctgagtgtaag

SEQ ID NO: 6840 - RNA, 21 nt, synthetic construct
  source 1..21: mol_type = other RNA
tagagtagctccctccttttc

SEQ ID NO: 6841 - RNA, 21 nt, synthetic construct
  source 1..21: mol_type = other RNA
tagctccctccttttccacct

SEQ ID NO: 6842 - RNA, 21 nt, synthetic construct
  source 1..21: mol_type = other RNA
taggaccttatggccctgcct

SEQ ID NO: 6843 - RNA, 21 nt, synthetic construct
  source 1..21: mol_type = other RNA
tatggccctgcctcctccctg

SEQ ID NO: 6844 - RNA, 21 nt, synthetic construct
  source 1..21: mol_type = other RNA
tcacaggacattttcttccaa

SEQ ID NO: 6845 - RNA, 21 nt, synthetic construct
  source 1..21: mol_type = other RNA
tcagccttagagtagctccct

SEQ ID NO: 6846 - RNA, 21 nt, synthetic construct
  source 1..21: mol_type = other RNA
tccaacaggtggaaaaggagg

SEQ ID NO: 6847 - RNA, 21 nt, synthetic construct
  source 1..21: mol_type = other RNA
tccacctgttggaagaaaatg

SEQ ID NO: 6848 - RNA, 21 nt, synthetic construct
  source 1..21: mol_type = other RNA
tccacgctcccgccccgcact

SEQ ID NO: 6849 - RNA, 21 nt, synthetic construct
  source 1..21: mol_type = other RNA
tcccgccccgcacttacactc

SEQ ID NO: 6850 - RNA, 21 nt, synthetic construct
  source 1..21: mol_type = other RNA
tccctccttttccacctgttg

SEQ ID NO: 6851 - RNA, 21 nt, synthetic construct
  source 1..21: mol_type = other RNA
tccctggcccctcacaggaca

SEQ ID NO: 6852 - RNA, 21 nt, synthetic construct
  source 1..21: mol_type = other RNA
tcctccctggcccctcacagg

SEQ ID NO: 6853 - RNA, 21 nt, synthetic construct
  source 1..21: mol_type = other RNA
tcctctaggaccttatggccc

SEQ ID NO: 6854 - RNA, 21 nt, synthetic construct
  source 1..21: mol_type = other RNA
tcctgtgaggggccagggagg

SEQ ID NO: 6855 - RNA, 21 nt, synthetic construct
  source 1..21: mol_type = other RNA
tccttttccacctgttggaag

SEQ ID NO: 6856 - RNA, 21 nt, synthetic construct
  source 1..21: mol_type = other RNA
tctaaggctgagtgtaagtgc

SEQ ID NO: 6857 - RNA, 21 nt, synthetic construct
  source 1..21: mol_type = other RNA
tctaggaccttatggccctgc

SEQ ID NO: 6858 - RNA, 21 nt, synthetic construct
  source 1..21: mol_type = other RNA
tcttccaacaggtggaaaagg

SEQ ID NO: 6859 - RNA, 21 nt, synthetic construct
  source 1..21: mol_type = other RNA
tgaggggccagggaggaggca

SEQ ID NO: 6860 - RNA, 21 nt, synthetic construct
  source 1..21: mol_type = other RNA
tgagtgtaagtgcggggcggg

SEQ ID NO: 6861 - RNA, 21 nt, synthetic construct
  source 1..21: mol_type = other RNA
tgcctcctccctggcccctca

SEQ ID NO: 6862 - RNA, 21 nt, synthetic construct
  source 1..21: mol_type = other RNA
tggaaaaggagggagctactc

SEQ ID NO: 6863 - RNA, 21 nt, synthetic construct
  source 1..21: mol_type = other RNA
tggaagaaaatgtcctgtgag

SEQ ID NO: 6864 - RNA, 21 nt, synthetic construct
  source 1..21: mol_type = other RNA
tggcccctcacaggacatttt

SEQ ID NO: 6865 - RNA, 21 nt, synthetic construct
  source 1..21: mol_type = other RNA
tggccctgcctcctccctggc

SEQ ID NO: 6866 - RNA, 21 nt, synthetic construct
  source 1..21: mol_type = other RNA
tgggcgagctcctccacgctc

SEQ ID NO: 6867 - RNA, 21 nt, synthetic construct
  source 1..21: mol_type = other RNA
tgtaagtgcggggcgggagcg

SEQ ID NO: 6868 - RNA, 21 nt, synthetic construct
  source 1..21: mol_type = other RNA
tgtcctgtgaggggccaggga

SEQ ID NO: 6869 - RNA, 21 nt, synthetic construct
  source 1..21: mol_type = other RNA
tgtgaggggccagggaggagg

SEQ ID NO: 6870 - RNA, 21 nt, synthetic construct
  source 1..21: mol_type = other RNA
tgttggaagaaaatgtcctgt

SEQ ID NO: 6871 - RNA, 21 nt, synthetic construct
  source 1..21: mol_type = other RNA
ttacactcagccttagagtag

SEQ ID NO: 6872 - RNA, 21 nt, synthetic construct
  source 1..21: mol_type = other RNA
ttagagtagctccctcctttt

SEQ ID NO: 6873 - RNA, 21 nt, synthetic construct
  source 1..21: mol_type = other RNA
ttatggccctgcctcctccct

SEQ ID NO: 6874 - RNA, 21 nt, synthetic construct
  source 1..21: mol_type = other RNA
ttccaacaggtggaaaaggag

SEQ ID NO: 6875 - RNA, 21 nt, synthetic construct
  source 1..21: mol_type = other RNA
ttccacctgttggaagaaaat

SEQ ID NO: 6876 - RNA, 21 nt, synthetic construct
  source 1..21: mol_type = other RNA
ttcctctaggaccttatggcc

SEQ ID NO: 6877 - RNA, 21 nt, synthetic construct
  source 1..21: mol_type = other RNA
ttcttccaacaggtggaaaag

SEQ ID NO: 6878 - RNA, 21 nt, synthetic construct
  source 1..21: mol_type = other RNA
ttggaagaaaatgtcctgtga

SEQ ID NO: 6879 - RNA, 21 nt, synthetic construct
  source 1..21: mol_type = other RNA
tttccacctgttggaagaaaa

SEQ ID NO: 6880 - RNA, 21 nt, synthetic construct
  source 1..21: mol_type = other RNA
tttcttccaacaggtggaaaa

SEQ ID NO: 6881 - RNA, 21 nt, synthetic construct
  source 1..21: mol_type = other RNA
ttttccacctgttggaagaaa

SEQ ID NO: 6882 - RNA, 21 nt, synthetic construct
  source 1..21: mol_type = other RNA
ttttcttccaacaggtggaaa

SEQ ID NO: 6883 - RNA, 22 nt, synthetic construct
  source 1..22: mol_type = other RNA
aaaaggagggagctactctaag

SEQ ID NO: 6884 - RNA, 22 nt, synthetic construct
  source 1..22: mol_type = other RNA
aaaatgtcctgtgaggggccag

SEQ ID NO: 6885 - RNA, 22 nt, synthetic construct
  source 1..22: mol_type = other RNA
aaaggagggagctactctaagg

SEQ ID NO: 6886 - RNA, 22 nt, synthetic construct
  source 1..22: mol_type = other RNA
aaatgtcctgtgaggggccagg

SEQ ID NO: 6887 - RNA, 22 nt, synthetic construct
  source 1..22: mol_type = other RNA
aacaggtggaaaaggagggagc

SEQ ID NO: 6888 - RNA, 22 nt, synthetic construct
  source 1..22: mol_type = other RNA
aagaaaatgtcctgtgaggggc

SEQ ID NO: 6889 - RNA, 22 nt, synthetic construct
  source 1..22: mol_type = other RNA
aaggagggagctactctaaggc

SEQ ID NO: 6890 - RNA, 22 nt, synthetic construct
  source 1..22: mol_type = other RNA
aaggctgagtgtaagtgcgggg

SEQ ID NO: 6891 - RNA, 22 nt, synthetic construct
  source 1..22: mol_type = other RNA
aagtgcggggcgggagcgtgga

SEQ ID NO: 6892 - RNA, 22 nt, synthetic construct
  source 1..22: mol_type = other RNA
aatgtcctgtgaggggccaggg

SEQ ID NO: 6893 - RNA, 22 nt, synthetic construct
  source 1..22: mol_type = other RNA
acactcagccttagagtagctc

SEQ ID NO: 6894 - RNA, 22 nt, synthetic construct
  source 1..22: mol_type = other RNA
acaggacattttcttccaacag

SEQ ID NO: 6895 - RNA, 22 nt, synthetic construct
  source 1..22: mol_type = other RNA
acaggtggaaaaggagggagct

SEQ ID NO: 6896 - RNA, 22 nt, synthetic construct
  source 1..22: mol_type = other RNA
acattttcttccaacaggtgga

SEQ ID NO: 6897 - RNA, 22 nt, synthetic construct
  source 1..22: mol_type = other RNA
acctgttggaagaaaatgtcct

SEQ ID NO: 6898 - RNA, 22 nt, synthetic construct
  source 1..22: mol_type = other RNA
accttatggccctgcctcctcc

SEQ ID NO: 6899 - RNA, 22 nt, synthetic construct
  source 1..22: mol_type = other RNA
acgctcccgccccgcacttaca

SEQ ID NO: 6900 - RNA, 22 nt, synthetic construct
  source 1..22: mol_type = other RNA
actcagccttagagtagctccc

SEQ ID NO: 6901 - RNA, 22 nt, synthetic construct
  source 1..22: mol_type = other RNA
actctaaggctgagtgtaagtg

SEQ ID NO: 6902 - RNA, 22 nt, synthetic construct
  source 1..22: mol_type = other RNA
acttacactcagccttagagta

SEQ ID NO: 6903 - RNA, 22 nt, synthetic construct
  source 1..22: mol_type = other RNA
agaaaatgtcctgtgaggggcc

SEQ ID NO: 6904 - RNA, 22 nt, synthetic construct
  source 1..22: mol_type = other RNA
agagtagctccctccttttcca

SEQ ID NO: 6905 - RNA, 22 nt, synthetic construct
  source 1..22: mol_type = other RNA
agccttagagtagctccctcct

SEQ ID NO: 6906 - RNA, 22 nt, synthetic construct
  source 1..22: mol_type = other RNA
agctactctaaggctgagtgta

SEQ ID NO: 6907 - RNA, 22 nt, synthetic construct
  source 1..22: mol_type = other RNA
agctccctccttttccacctgt

SEQ ID NO: 6908 - RNA, 22 nt, synthetic construct
  source 1..22: mol_type = other RNA
agctcctccacgctcccgcccc

SEQ ID NO: 6909 - RNA, 22 nt, synthetic construct
  source 1..22: mol_type = other RNA
aggacattttcttccaacaggt

SEQ ID NO: 6910 - RNA, 22 nt, synthetic construct
  source 1..22: mol_type = other RNA
aggaccttatggccctgcctcc

SEQ ID NO: 6911 - RNA, 22 nt, synthetic construct
  source 1..22: mol_type = other RNA
aggaggcagggccataaggtcc

SEQ ID NO: 6912 - RNA, 22 nt, synthetic construct
  source 1..22: mol_type = other RNA
aggagggagctactctaaggct

SEQ ID NO: 6913 - RNA, 22 nt, synthetic construct
  source 1..22: mol_type = other RNA
aggaggttcctctaggacctta

SEQ ID NO: 6914 - RNA, 22 nt, synthetic construct
  source 1..22: mol_type = other RNA
aggcagggccataaggtcctag

SEQ ID NO: 6915 - RNA, 22 nt, synthetic construct
  source 1..22: mol_type = other RNA
aggctgagtgtaagtgcggggc

SEQ ID NO: 6916 - RNA, 22 nt, synthetic construct
  source 1..22: mol_type = other RNA
agggagctactctaaggctgag

SEQ ID NO: 6917 - RNA, 22 nt, synthetic construct
  source 1..22: mol_type = other RNA
agggaggaggcagggccataag

SEQ ID NO: 6918 - RNA, 22 nt, synthetic construct
  source 1..22: mol_type = other RNA
aggggccagggaggaggcaggg

SEQ ID NO: 6919 - RNA, 22 nt, synthetic construct
  source 1..22: mol_type = other RNA
aggtggaaaaggagggagctac

SEQ ID NO: 6920 - RNA, 22 nt, synthetic construct
  source 1..22: mol_type = other RNA
aggttcctctaggaccttatgg

SEQ ID NO: 6921 - RNA, 22 nt, synthetic construct
  source 1..22: mol_type = other RNA
agtagctccctccttttccacc

SEQ ID NO: 6922 - RNA, 22 nt, synthetic construct
  source 1..22: mol_type = other RNA
agtgcggggcgggagcgtggag

SEQ ID NO: 6923 - RNA, 22 nt, synthetic construct
  source 1..22: mol_type = other RNA
agtgtaagtgcggggcgggagc

SEQ ID NO: 6924 - RNA, 22 nt, synthetic construct
  source 1..22: mol_type = other RNA
atggccctgcctcctccctggc

SEQ ID NO: 6925 - RNA, 22 nt, synthetic construct
  source 1..22: mol_type = other RNA
atgtcctgtgaggggccaggga

SEQ ID NO: 6926 - RNA, 22 nt, synthetic construct
  source 1..22: mol_type = other RNA
attttcttccaacaggtggaaa

SEQ ID NO: 6927 - RNA, 22 nt, synthetic construct
  source 1..22: mol_type = other RNA
caacaggtggaaaaggagggag

SEQ ID NO: 6928 - RNA, 22 nt, synthetic construct
  source 1..22: mol_type = other RNA
cacaggacattttcttccaaca

SEQ ID NO: 6929 - RNA, 22 nt, synthetic construct
  source 1..22: mol_type = other RNA
cacctgttggaagaaaatgtcc

SEQ ID NO: 6930 - RNA, 22 nt, synthetic construct
  source 1..22: mol_type = other RNA
cacgctcccgccccgcacttac

SEQ ID NO: 6931 - RNA, 22 nt, synthetic construct
  source 1..22: mol_type = other RNA
cactcagccttagagtagctcc

SEQ ID NO: 6932 - RNA, 22 nt, synthetic construct
  source 1..22: mol_type = other RNA
cacttacactcagccttagagt

SEQ ID NO: 6933 - RNA, 22 nt, synthetic construct
  source 1..22: mol_type = other RNA
cagccttagagtagctccctcc

SEQ ID NO: 6934 - RNA, 22 nt, synthetic construct
  source 1..22: mol_type = other RNA
caggacattttcttccaacagg

SEQ ID NO: 6935 - RNA, 22 nt, synthetic construct
  source 1..22: mol_type = other RNA
cagggaggaggcagggccataa

SEQ ID NO: 6936 - RNA, 22 nt, synthetic construct
  source 1..22: mol_type = other RNA
cagggccataaggtcctagagg

SEQ ID NO: 6937 - RNA, 22 nt, synthetic construct
  source 1..22: mol_type = other RNA
caggtggaaaaggagggagcta

SEQ ID NO: 6938 - RNA, 22 nt, synthetic construct
  source 1..22: mol_type = other RNA
cattttcttccaacaggtggaa

SEQ ID NO: 6939 - RNA, 22 nt, synthetic construct
  source 1..22: mol_type = other RNA
ccaacaggtggaaaaggaggga

SEQ ID NO: 6940 - RNA, 22 nt, synthetic construct
  source 1..22: mol_type = other RNA
ccacctgttggaagaaaatgtc

SEQ ID NO: 6941 - RNA, 22 nt, synthetic construct
  source 1..22: mol_type = other RNA
ccacgctcccgccccgcactta

SEQ ID NO: 6942 - RNA, 22 nt, synthetic construct
  source 1..22: mol_type = other RNA
ccagggaggaggcagggccata

SEQ ID NO: 6943 - RNA, 22 nt, synthetic construct
  source 1..22: mol_type = other RNA
ccccgcacttacactcagcctt

SEQ ID NO: 6944 - RNA, 22 nt, synthetic construct
  source 1..22: mol_type = other RNA
cccctcacaggacattttcttc

SEQ ID NO: 6945 - RNA, 22 nt, synthetic construct
  source 1..22: mol_type = other RNA
cccgcacttacactcagcctta

SEQ ID NO: 6946 - RNA, 22 nt, synthetic construct
  source 1..22: mol_type = other RNA
cccgccccgcacttacactcag

SEQ ID NO: 6947 - RNA, 22 nt, synthetic construct
  source 1..22: mol_type = other RNA
ccctcacaggacattttcttcc

SEQ ID NO: 6948 - RNA, 22 nt, synthetic construct
  source 1..22: mol_type = other RNA
ccctccttttccacctgttgga

SEQ ID NO: 6949 - RNA, 22 nt, synthetic construct
  source 1..22: mol_type = other RNA
ccctgcctcctccctggcccct

SEQ ID NO: 6950 - RNA, 22 nt, synthetic construct
  source 1..22: mol_type = other RNA
ccctggcccctcacaggacatt

SEQ ID NO: 6951 - RNA, 22 nt, synthetic construct
  source 1..22: mol_type = other RNA
ccgcacttacactcagccttag

SEQ ID NO: 6952 - RNA, 22 nt, synthetic construct
  source 1..22: mol_type = other RNA
ccgccccgcacttacactcagc

SEQ ID NO: 6953 - RNA, 22 nt, synthetic construct
  source 1..22: mol_type = other RNA
cctcacaggacattttcttcca

SEQ ID NO: 6954 - RNA, 22 nt, synthetic construct
  source 1..22: mol_type = other RNA
cctccctggcccctcacaggac

SEQ ID NO: 6955 - RNA, 22 nt, synthetic construct
  source 1..22: mol_type = other RNA
cctcctccctggcccctcacag

SEQ ID NO: 6956 - RNA, 22 nt, synthetic construct
  source 1..22: mol_type = other RNA
cctccttttccacctgttggaa

SEQ ID NO: 6957 - RNA, 22 nt, synthetic construct
  source 1..22: mol_type = other RNA
cctctaggaccttatggccctg

SEQ ID NO: 6958 - RNA, 22 nt, synthetic construct
  source 1..22: mol_type = other RNA
cctgcctcctccctggcccctc

SEQ ID NO: 6959 - RNA, 22 nt, synthetic construct
  source 1..22: mol_type = other RNA
cctggcccctcacaggacattt

SEQ ID NO: 6960 - RNA, 22 nt, synthetic construct
  source 1..22: mol_type = other RNA
cctgtgaggggccagggaggag

SEQ ID NO: 6961 - RNA, 22 nt, synthetic construct
  source 1..22: mol_type = other RNA
cctgttggaagaaaatgtcctg

SEQ ID NO: 6962 - RNA, 22 nt, synthetic construct
  source 1..22: mol_type = other RNA
ccttagagtagctccctccttt

SEQ ID NO: 6963 - RNA, 22 nt, synthetic construct
  source 1..22: mol_type = other RNA
ccttatggccctgcctcctccc

SEQ ID NO: 6964 - RNA, 22 nt, synthetic construct
  source 1..22: mol_type = other RNA
ccttttccacctgttggaagaa

SEQ ID NO: 6965 - RNA, 22 nt, synthetic construct
  source 1..22: mol_type = other RNA
cgagctcctccacgctcccgcc

SEQ ID NO: 6966 - RNA, 22 nt, synthetic construct
  source 1..22: mol_type = other RNA
cgcacttacactcagccttaga

SEQ ID NO: 6967 - RNA, 22 nt, synthetic construct
  source 1..22: mol_type = other RNA
cgccccgcacttacactcagcc

SEQ ID NO: 6968 - RNA, 22 nt, synthetic construct
  source 1..22: mol_type = other RNA
cgctcccgccccgcacttacac

SEQ ID NO: 6969 - RNA, 22 nt, synthetic construct
  source 1..22: mol_type = other RNA
ctaaggctgagtgtaagtgcgg

SEQ ID NO: 6970 - RNA, 22 nt, synthetic construct
  source 1..22: mol_type = other RNA
ctactctaaggctgagtgtaag

SEQ ID NO: 6971 - RNA, 22 nt, synthetic construct
  source 1..22: mol_type = other RNA
ctaggaccttatggccctgcct

SEQ ID NO: 6972 - RNA, 22 nt, synthetic construct
  source 1..22: mol_type = other RNA
ctcacaggacattttcttccaa

SEQ ID NO: 6973 - RNA, 22 nt, synthetic construct
  source 1..22: mol_type = other RNA
ctcagccttagagtagctccct

SEQ ID NO: 6974 - RNA, 22 nt, synthetic construct
  source 1..22: mol_type = other RNA
ctccacgctcccgccccgcact

SEQ ID NO: 6975 - RNA, 22 nt, synthetic construct
  source 1..22: mol_type = other RNA
ctcccgccccgcacttacactc

SEQ ID NO: 6976 - RNA, 22 nt, synthetic construct
  source 1..22: mol_type = other RNA
ctccctccttttccacctgttg

SEQ ID NO: 6977 - RNA, 22 nt, synthetic construct
  source 1..22: mol_type = other RNA
ctccctggcccctcacaggaca

SEQ ID NO: 6978 - RNA, 22 nt, synthetic construct
  source 1..22: mol_type = other RNA
ctcctccctggcccctcacagg

SEQ ID NO: 6979 - RNA, 22 nt, synthetic construct
  source 1..22: mol_type = other RNA
ctccttttccacctgttggaag

SEQ ID NO: 6980 - RNA, 22 nt, synthetic construct
  source 1..22: mol_type = other RNA
ctctaaggctgagtgtaagtgc

SEQ ID NO: 6981 - RNA, 22 nt, synthetic construct
  source 1..22: mol_type = other RNA
ctctaggaccttatggccctgc

SEQ ID NO: 6982 - RNA, 22 nt, synthetic construct
  source 1..22: mol_type = other RNA
ctgagtgtaagtgcggggcggg

SEQ ID NO: 6983 - RNA, 22 nt, synthetic construct
  source 1..22: mol_type = other RNA
ctgcctcctccctggcccctca

SEQ ID NO: 6984 - RNA, 22 nt, synthetic construct
  source 1..22: mol_type = other RNA
ctggcccctcacaggacatttt

SEQ ID NO: 6985 - RNA, 22 nt, synthetic construct
  source 1..22: mol_type = other RNA
ctgtgaggggccagggaggagg

SEQ ID NO: 6986 - RNA, 22 nt, synthetic construct
  source 1..22: mol_type = other RNA
ctgttggaagaaaatgtcctgt

SEQ ID NO: 6987 - RNA, 22 nt, synthetic construct
  source 1..22: mol_type = other RNA
cttacactcagccttagagtag

SEQ ID NO: 6988 - RNA, 22 nt, synthetic construct
  source 1..22: mol_type = other RNA
cttagagtagctccctcctttt

SEQ ID NO: 6989 - RNA, 22 nt, synthetic construct
  source 1..22: mol_type = other RNA
cttatggccctgcctcctccct

SEQ ID NO: 6990 - RNA, 22 nt, synthetic construct
  source 1..22: mol_type = other RNA
cttccaacaggtggaaaaggag

SEQ ID NO: 6991 - RNA, 22 nt, synthetic construct
  source 1..22: mol_type = other RNA
cttttccacctgttggaagaaa

SEQ ID NO: 6992 - RNA, 22 nt, synthetic construct
  source 1..22: mol_type = other RNA
gaaaaggagggagctactctaa

SEQ ID NO: 6993 - RNA, 22 nt, synthetic construct
  source 1..22: mol_type = other RNA
gaaaatgtcctgtgaggggcca

SEQ ID NO: 6994 - RNA, 22 nt, synthetic construct
  source 1..22: mol_type = other RNA
gaagaaaatgtcctgtgagggg

SEQ ID NO: 6995 - RNA, 22 nt, synthetic construct
  source 1..22: mol_type = other RNA
gacattttcttccaacaggtgg

SEQ ID NO: 6996 - RNA, 22 nt, synthetic construct
  source 1..22: mol_type = other RNA
gaccttatggccctgcctcctc

SEQ ID NO: 6997 - RNA, 22 nt, synthetic construct
  source 1..22: mol_type = other RNA
gagctactctaaggctgagtgt

SEQ ID NO: 6998 - RNA, 22 nt, synthetic construct
  source 1..22: mol_type = other RNA
gagctcctccacgctcccgccc

SEQ ID NO: 6999 - RNA, 22 nt, synthetic construct
  source 1..22: mol_type = other RNA
gaggaggcagggccataaggtc

SEQ ID NO: 7000 - RNA, 22 nt, synthetic construct
  source 1..22: mol_type = other RNA
gaggcagggccataaggtccta

SEQ ID NO: 7001 - RNA, 22 nt, synthetic construct
  source 1..22: mol_type = other RNA
gagggagctactctaaggctga

SEQ ID NO: 7002 - RNA, 22 nt, synthetic construct
  source 1..22: mol_type = other RNA
gaggggccagggaggaggcagg

SEQ ID NO: 7003 - RNA, 22 nt, synthetic construct
  source 1..22: mol_type = other RNA
gaggttcctctaggaccttatg

SEQ ID NO: 7004 - RNA, 22 nt, synthetic construct
  source 1..22: mol_type = other RNA
gagtagctccctccttttccac

SEQ ID NO: 7005 - RNA, 22 nt, synthetic construct
  source 1..22: mol_type = other RNA
gagtgtaagtgcggggcgggag

SEQ ID NO: 7006 - RNA, 22 nt, synthetic construct
  source 1..22: mol_type = other RNA
gcacttacactcagccttagag

SEQ ID NO: 7007 - RNA, 22 nt, synthetic construct
  source 1..22: mol_type = other RNA
gcagggccataaggtcctagag

SEQ ID NO: 7008 - RNA, 22 nt, synthetic construct
  source 1..22: mol_type = other RNA
gccagggaggaggcagggccat

SEQ ID NO: 7009 - RNA, 22 nt, synthetic construct
  source 1..22: mol_type = other RNA
gccccgcacttacactcagcct

SEQ ID NO: 7010 - RNA, 22 nt, synthetic construct
  source 1..22: mol_type = other RNA
gcccctcacaggacattttctt

SEQ ID NO: 7011 - RNA, 22 nt, synthetic construct
  source 1..22: mol_type = other RNA
gcctcctccctggcccctcaca

SEQ ID NO: 7012 - RNA, 22 nt, synthetic construct
  source 1..22: mol_type = other RNA
gccttagagtagctccctcctt

SEQ ID NO: 7013 - RNA, 22 nt, synthetic construct
  source 1..22: mol_type = other RNA
gcgagctcctccacgctcccgc

SEQ ID NO: 7014 - RNA, 22 nt, synthetic construct
  source 1..22: mol_type = other RNA
gctactctaaggctgagtgtaa

SEQ ID NO: 7015 - RNA, 22 nt, synthetic construct
  source 1..22: mol_type = other RNA
gctcccgccccgcacttacact

SEQ ID NO: 7016 - RNA, 22 nt, synthetic construct
  source 1..22: mol_type = other RNA
gctccctccttttccacctgtt

SEQ ID NO: 7017 - RNA, 22 nt, synthetic construct
  source 1..22: mol_type = other RNA
gctgagtgtaagtgcggggcgg

SEQ ID NO: 7018 - RNA, 22 nt, synthetic construct
  source 1..22: mol_type = other RNA
ggaaaaggagggagctactcta

SEQ ID NO: 7019 - RNA, 22 nt, synthetic construct
  source 1..22: mol_type = other RNA
ggaagaaaatgtcctgtgaggg

SEQ ID NO: 7020 - RNA, 22 nt, synthetic construct
  source 1..22: mol_type = other RNA
ggacattttcttccaacaggtg

SEQ ID NO: 7021 - RNA, 22 nt, synthetic construct
  source 1..22: mol_type = other RNA
ggaccttatggccctgcctcct

SEQ ID NO: 7022 - RNA, 22 nt, synthetic construct
  source 1..22: mol_type = other RNA
ggagctactctaaggctgagtg

SEQ ID NO: 7023 - RNA, 22 nt, synthetic construct
  source 1..22: mol_type = other RNA
ggaggaggcagggccataaggt

SEQ ID NO: 7024 - RNA, 22 nt, synthetic construct
  source 1..22: mol_type = other RNA
ggaggcagggccataaggtcct

SEQ ID NO: 7025 - RNA, 22 nt, synthetic construct
  source 1..22: mol_type = other RNA
ggagggagctactctaaggctg

SEQ ID NO: 7026 - RNA, 22 nt, synthetic construct
  source 1..22: mol_type = other RNA
ggaggttcctctaggaccttat

SEQ ID NO: 7027 - RNA, 22 nt, synthetic construct
  source 1..22: mol_type = other RNA
ggcagggccataaggtcctaga

SEQ ID NO: 7028 - RNA, 22 nt, synthetic construct
  source 1..22: mol_type = other RNA
ggccagggaggaggcagggcca

SEQ ID NO: 7029 - RNA, 22 nt, synthetic construct
  source 1..22: mol_type = other RNA
ggcccctcacaggacattttct

SEQ ID NO: 7030 - RNA, 22 nt, synthetic construct
  source 1..22: mol_type = other RNA
ggcgagctcctccacgctcccg

SEQ ID NO: 7031 - RNA, 22 nt, synthetic construct
  source 1..22: mol_type = other RNA
ggctgagtgtaagtgcggggcg

SEQ ID NO: 7032 - RNA, 22 nt, synthetic construct
  source 1..22: mol_type = other RNA
gggagctactctaaggctgagt

SEQ ID NO: 7033 - RNA, 22 nt, synthetic construct
  source 1..22: mol_type = other RNA
gggaggaggcagggccataagg

SEQ ID NO: 7034 - RNA, 22 nt, synthetic construct
  source 1..22: mol_type = other RNA
gggcgagctcctccacgctccc

SEQ ID NO: 7035 - RNA, 22 nt, synthetic construct
  source 1..22: mol_type = other RNA
ggggcgggagcgtggaggagct

SEQ ID NO: 7036 - RNA, 22 nt, synthetic construct
  source 1..22: mol_type = other RNA
ggtggaaaaggagggagctact

SEQ ID NO: 7037 - RNA, 22 nt, synthetic construct
  source 1..22: mol_type = other RNA
ggtgggcgagctcctccacgct

SEQ ID NO: 7038 - RNA, 22 nt, synthetic construct
  source 1..22: mol_type = other RNA
ggttcctctaggaccttatggc

SEQ ID NO: 7039 - RNA, 22 nt, synthetic construct
  source 1..22: mol_type = other RNA
gtaagtgcggggcgggagcgtg

SEQ ID NO: 7040 - RNA, 22 nt, synthetic construct
  source 1..22: mol_type = other RNA
gtagctccctccttttccacct

SEQ ID NO: 7041 - RNA, 22 nt, synthetic construct
  source 1..22: mol_type = other RNA
gtcctgtgaggggccagggagg

SEQ ID NO: 7042 - RNA, 22 nt, synthetic construct
  source 1..22: mol_type = other RNA
gtgaggggccagggaggaggca

SEQ ID NO: 7043 - RNA, 22 nt, synthetic construct
  source 1..22: mol_type = other RNA
gtggaaaaggagggagctactc

SEQ ID NO: 7044 - RNA, 22 nt, synthetic construct
  source 1..22: mol_type = other RNA
gtgggcgagctcctccacgctc

SEQ ID NO: 7045 - RNA, 22 nt, synthetic construct
  source 1..22: mol_type = other RNA
gtgtaagtgcggggcgggagcg

SEQ ID NO: 7046 - RNA, 22 nt, synthetic construct
  source 1..22: mol_type = other RNA
gttcctctaggaccttatggcc

SEQ ID NO: 7047 - RNA, 22 nt, synthetic construct
  source 1..22: mol_type = other RNA
gttggaagaaaatgtcctgtga

SEQ ID NO: 7048 - RNA, 22 nt, synthetic construct
  source 1..22: mol_type = other RNA
taaggctgagtgtaagtgcggg

SEQ ID NO: 7049 - RNA, 22 nt, synthetic construct
  source 1..22: mol_type = other RNA
taagtgcggggcgggagcgtgg

SEQ ID NO: 7050 - RNA, 22 nt, synthetic construct
  source 1..22: mol_type = other RNA
tacactcagccttagagtagct

SEQ ID NO: 7051 - RNA, 22 nt, synthetic construct
  source 1..22: mol_type = other RNA
tactctaaggctgagtgtaagt

SEQ ID NO: 7052 - RNA, 22 nt, synthetic construct
  source 1..22: mol_type = other RNA
tagagtagctccctccttttcc

SEQ ID NO: 7053 - RNA, 22 nt, synthetic construct
  source 1..22: mol_type = other RNA
tagctccctccttttccacctg

SEQ ID NO: 7054 - RNA, 22 nt, synthetic construct
  source 1..22: mol_type = other RNA
taggaccttatggccctgcctc

SEQ ID NO: 7055 - RNA, 22 nt, synthetic construct
  source 1..22: mol_type = other RNA
tatggccctgcctcctccctgg

SEQ ID NO: 7056 - RNA, 22 nt, synthetic construct
  source 1..22: mol_type = other RNA
tcacaggacattttcttccaac

SEQ ID NO: 7057 - RNA, 22 nt, synthetic construct
  source 1..22: mol_type = other RNA
tcagccttagagtagctccctc

SEQ ID NO: 7058 - RNA, 22 nt, synthetic construct
  source 1..22: mol_type = other RNA
tccaacaggtggaaaaggaggg

SEQ ID NO: 7059 - RNA, 22 nt, synthetic construct
  source 1..22: mol_type = other RNA
tccacctgttggaagaaaatgt

SEQ ID NO: 7060 - RNA, 22 nt, synthetic construct
  source 1..22: mol_type = other RNA
tccacgctcccgccccgcactt

SEQ ID NO: 7061 - RNA, 22 nt, synthetic construct
  source 1..22: mol_type = other RNA
tcccgccccgcacttacactca

SEQ ID NO: 7062 - RNA, 22 nt, synthetic construct
  source 1..22: mol_type = other RNA
tccctccttttccacctgttgg

SEQ ID NO: 7063 - RNA, 22 nt, synthetic construct
  source 1..22: mol_type = other RNA
tccctggcccctcacaggacat

SEQ ID NO: 7064 - RNA, 22 nt, synthetic construct
  source 1..22: mol_type = other RNA
tcctccacgctcccgccccgca

SEQ ID NO: 7065 - RNA, 22 nt, synthetic construct
  source 1..22: mol_type = other RNA
tcctccctggcccctcacagga

SEQ ID NO: 7066 - RNA, 22 nt, synthetic construct
  source 1..22: mol_type = other RNA
tcctctaggaccttatggccct

SEQ ID NO: 7067 - RNA, 22 nt, synthetic construct
  source 1..22: mol_type = other RNA
tcctgtgaggggccagggagga

SEQ ID NO: 7068 - RNA, 22 nt, synthetic construct
  source 1..22: mol_type = other RNA
tccttttccacctgttggaaga

SEQ ID NO: 7069 - RNA, 22 nt, synthetic construct
  source 1..22: mol_type = other RNA
tctaaggctgagtgtaagtgcg

SEQ ID NO: 7070 - RNA, 22 nt, synthetic construct
  source 1..22: mol_type = other RNA
tctaggaccttatggccctgcc

SEQ ID NO: 7071 - RNA, 22 nt, synthetic construct
  source 1..22: mol_type = other RNA
tcttccaacaggtggaaaagga

SEQ ID NO: 7072 - RNA, 22 nt, synthetic construct
  source 1..22: mol_type = other RNA
tgaggggccagggaggaggcag

SEQ ID NO: 7073 - RNA, 22 nt, synthetic construct
  source 1..22: mol_type = other RNA
tgagtgtaagtgcggggcggga

SEQ ID NO: 7074 - RNA, 22 nt, synthetic construct
  source 1..22: mol_type = other RNA
tgcctcctccctggcccctcac

SEQ ID NO: 7075 - RNA, 22 nt, synthetic construct
  source 1..22: mol_type = other RNA
tgcggggcgggagcgtggagga

SEQ ID NO: 7076 - RNA, 22 nt, synthetic construct
  source 1..22: mol_type = other RNA
tggaaaaggagggagctactct

SEQ ID NO: 7077 - RNA, 22 nt, synthetic construct
  source 1..22: mol_type = other RNA
tggaagaaaatgtcctgtgagg

SEQ ID NO: 7078 - RNA, 22 nt, synthetic construct
  source 1..22: mol_type = other RNA
tggcccctcacaggacattttc

SEQ ID NO: 7079 - RNA, 22 nt, synthetic construct
  source 1..22: mol_type = other RNA
tggccctgcctcctccctggcc

SEQ ID NO: 7080 - RNA, 22 nt, synthetic construct
  source 1..22: mol_type = other RNA
tgggcgagctcctccacgctcc

SEQ ID NO: 7081 - RNA, 22 nt, synthetic construct
  source 1..22: mol_type = other RNA
tgtaagtgcggggcgggagcgt

SEQ ID NO: 7082 - RNA, 22 nt, synthetic construct
  source 1..22: mol_type = other RNA
tgtcctgtgaggggccagggag

SEQ ID NO: 7083 - RNA, 22 nt, synthetic construct
  source 1..22: mol_type = other RNA
tgtgaggggccagggaggaggc

SEQ ID NO: 7084 - RNA, 22 nt, synthetic construct
  source 1..22: mol_type = other RNA
tgttggaagaaaatgtcctgtg

SEQ ID NO: 7085 - RNA, 22 nt, synthetic construct
  source 1..22: mol_type = other RNA
ttacactcagccttagagtagc

SEQ ID NO: 7086 - RNA, 22 nt, synthetic construct
  source 1..22: mol_type = other RNA
ttagagtagctccctccttttc

SEQ ID NO: 7087 - RNA, 22 nt, synthetic construct
  source 1..22: mol_type = other RNA
ttatggccctgcctcctccctg

SEQ ID NO: 7088 - RNA, 22 nt, synthetic construct
  source 1..22: mol_type = other RNA
ttccaacaggtggaaaaggagg

SEQ ID NO: 7089 - RNA, 22 nt, synthetic construct
  source 1..22: mol_type = other RNA
ttccacctgttggaagaaaatg

SEQ ID NO: 7090 - RNA, 22 nt, synthetic construct
  source 1..22: mol_type = other RNA
ttcctctaggaccttatggccc

SEQ ID NO: 7091 - RNA, 22 nt, synthetic construct
  source 1..22: mol_type = other RNA
ttcttccaacaggtggaaaagg

SEQ ID NO: 7092 - RNA, 22 nt, synthetic construct
  source 1..22: mol_type = other RNA
ttggaagaaaatgtcctgtgag

SEQ ID NO: 7093 - RNA, 22 nt, synthetic construct
  source 1..22: mol_type = other RNA
tttccacctgttggaagaaaat

SEQ ID NO: 7094 - RNA, 22 nt, synthetic construct
  source 1..22: mol_type = other RNA
tttcttccaacaggtggaaaag

SEQ ID NO: 7095 - RNA, 22 nt, synthetic construct
  source 1..22: mol_type = other RNA
ttttccacctgttggaagaaaa

SEQ ID NO: 7096 - RNA, 22 nt, synthetic construct
  source 1..22: mol_type = other RNA
ttttcttccaacaggtggaaaa

SEQ ID NO: 7097 - RNA, 20 nt, synthetic construct
  source 1..20: mol_type = other RNA
aaaaacaagacctggtcaga

SEQ ID NO: 7098 - RNA, 20 nt, synthetic construct
  source 1..20: mol_type = other RNA
aaaacaagacctggtcagag

SEQ ID NO: 7099 - RNA, 20 nt, synthetic construct
  source 1..20: mol_type = other RNA
aaacaagacctggtcagagc

SEQ ID NO: 7100 - RNA, 20 nt, synthetic construct
  source 1..20: mol_type = other RNA
aaaggtgagattctgggggt

SEQ ID NO: 7101 - RNA, 20 nt, synthetic construct
  source 1..20: mol_type = other RNA
aacaaaaacaagacctggtc

SEQ ID NO: 7102 - RNA, 20 nt, synthetic construct
  source 1..20: mol_type = other RNA
aacaagacctggtcagagcc

SEQ ID NO: 7103 - RNA, 20 nt, synthetic construct
  source 1..20: mol_type = other RNA
aagacctggtcagagcccac

SEQ ID NO: 7104 - RNA, 20 nt, synthetic construct
  source 1..20: mol_type = other RNA
aagctgtgagactcagaccc

SEQ ID NO: 7105 - RNA, 20 nt, synthetic construct
  source 1..20: mol_type = other RNA
aaggtgagattctgggggtc

SEQ ID NO: 7106 - RNA, 20 nt, synthetic construct
  source 1..20: mol_type = other RNA
aatctcacctttacaagctg

SEQ ID NO: 7107 - RNA, 20 nt, synthetic construct
  source 1..20: mol_type = other RNA
aattcctcctgcaccacatc

SEQ ID NO: 7108 - RNA, 20 nt, synthetic construct
  source 1..20: mol_type = other RNA
acaaaaacaagacctggtca

SEQ ID NO: 7109 - RNA, 20 nt, synthetic construct
  source 1..20: mol_type = other RNA
acaagacctggtcagagccc

SEQ ID NO: 7110 - RNA, 20 nt, synthetic construct
  source 1..20: mol_type = other RNA
acaagctgtgagactcagac

SEQ ID NO: 7111 - RNA, 20 nt, synthetic construct
  source 1..20: mol_type = other RNA
acagcttgtaaaggtgagat

SEQ ID NO: 7112 - RNA, 20 nt, synthetic construct
  source 1..20: mol_type = other RNA
acaggagatgtggtgcagga

SEQ ID NO: 7113 - RNA, 20 nt, synthetic construct
  source 1..20: mol_type = other RNA
acagtgcccaggggtctgag

SEQ ID NO: 7114 - RNA, 20 nt, synthetic construct
  source 1..20: mol_type = other RNA
acatctcctgtgggctctga

SEQ ID NO: 7115 - RNA, 20 nt, synthetic construct
  source 1..20: mol_type = other RNA
accacatctcctgtgggctc

SEQ ID NO: 7116 - RNA, 20 nt, synthetic construct
  source 1..20: mol_type = other RNA
accaggtcttgtttttgttc

SEQ ID NO: 7117 - RNA, 20 nt, synthetic construct
  source 1..20: mol_type = other RNA
acccacttcagacccccaga

SEQ ID NO: 7118 - RNA, 20 nt, synthetic construct
  source 1..20: mol_type = other RNA
accccagggagcgacagtgc

SEQ ID NO: 7119 - RNA, 20 nt, synthetic construct
  source 1..20: mol_type = other RNA
acccccagaatctcaccttt

SEQ ID NO: 7120 - RNA, 20 nt, synthetic construct
  source 1..20: mol_type = other RNA
acccctgggcactgtcgctc

SEQ ID NO: 7121 - RNA, 20 nt, synthetic construct
  source 1..20: mol_type = other RNA
accctataattcctcctgca

SEQ ID NO: 7122 - RNA, 20 nt, synthetic construct
  source 1..20: mol_type = other RNA
accctccacccacttcagac

SEQ ID NO: 7123 - RNA, 20 nt, synthetic construct
  source 1..20: mol_type = other RNA
acctggtcagagcccacagg

SEQ ID NO: 7124 - RNA, 20 nt, synthetic construct
  source 1..20: mol_type = other RNA
acctttacaagctgtgagac

SEQ ID NO: 7125 - RNA, 20 nt, synthetic construct
  source 1..20: mol_type = other RNA
actcagacccctgggcactg

SEQ ID NO: 7126 - RNA, 20 nt, synthetic construct
  source 1..20: mol_type = other RNA
actgtcgctccctggggtag

SEQ ID NO: 7127 - RNA, 20 nt, synthetic construct
  source 1..20: mol_type = other RNA
acttcagacccccagaatct

SEQ ID NO: 7128 - RNA, 20 nt, synthetic construct
  source 1..20: mol_type = other RNA
agaacaaaaacaagacctgg

SEQ ID NO: 7129 - RNA, 20 nt, synthetic construct
  source 1..20: mol_type = other RNA
agaatctcacctttacaagc

SEQ ID NO: 7130 - RNA, 20 nt, synthetic construct
  source 1..20: mol_type = other RNA
agacccccagaatctcacct

SEQ ID NO: 7131 - RNA, 20 nt, synthetic construct
  source 1..20: mol_type = other RNA
agacccctgggcactgtcgc

SEQ ID NO: 7132 - RNA, 20 nt, synthetic construct
  source 1..20: mol_type = other RNA
agacctggtcagagcccaca

SEQ ID NO: 7133 - RNA, 20 nt, synthetic construct
  source 1..20: mol_type = other RNA
agactcagacccctgggcac

SEQ ID NO: 7134 - RNA, 20 nt, synthetic construct
  source 1..20: mol_type = other RNA
agagcccacaggagatgtgg

SEQ ID NO: 7135 - RNA, 20 nt, synthetic construct
  source 1..20: mol_type = other RNA
agatgtggtgcaggaggaat

SEQ ID NO: 7136 - RNA, 20 nt, synthetic construct
  source 1..20: mol_type = other RNA
agattctgggggtctgaagt

SEQ ID NO: 7137 - RNA, 20 nt, synthetic construct
  source 1..20: mol_type = other RNA
agcccacaggagatgtggtg

SEQ ID NO: 7138 - RNA, 20 nt, synthetic construct
  source 1..20: mol_type = other RNA
agcgacagtgcccaggggtc

SEQ ID NO: 7139 - RNA, 20 nt, synthetic construct
  source 1..20: mol_type = other RNA
agctgtgagactcagacccc

SEQ ID NO: 7140 - RNA, 20 nt, synthetic construct
  source 1..20: mol_type = other RNA
agcttgtaaaggtgagattc

SEQ ID NO: 7141 - RNA, 20 nt, synthetic construct
  source 1..20: mol_type = other RNA
aggagatgtggtgcaggagg

SEQ ID NO: 7142 - RNA, 20 nt, synthetic construct
  source 1..20: mol_type = other RNA
agggagcgacagtgcccagg

SEQ ID NO: 7143 - RNA, 20 nt, synthetic construct
  source 1..20: mol_type = other RNA
aggggtctgagtctcacagc

SEQ ID NO: 7144 - RNA, 20 nt, synthetic construct
  source 1..20: mol_type = other RNA
aggtcttgtttttgttctac

SEQ ID NO: 7145 - RNA, 20 nt, synthetic construct
  source 1..20: mol_type = other RNA
aggtgagattctgggggtct

SEQ ID NO: 7146 - RNA, 20 nt, synthetic construct
  source 1..20: mol_type = other RNA
agtctcacagcttgtaaagg

SEQ ID NO: 7147 - RNA, 20 nt, synthetic construct
  source 1..20: mol_type = other RNA
agtgcccaggggtctgagtc

SEQ ID NO: 7148 - RNA, 20 nt, synthetic construct
  source 1..20: mol_type = other RNA
ataattcctcctgcaccaca

SEQ ID NO: 7149 - RNA, 20 nt, synthetic construct
  source 1..20: mol_type = other RNA
atctcacctttacaagctgt

SEQ ID NO: 7150 - RNA, 20 nt, synthetic construct
  source 1..20: mol_type = other RNA
atctcctgtgggctctgacc

SEQ ID NO: 7151 - RNA, 20 nt, synthetic construct
  source 1..20: mol_type = other RNA
attcctcctgcaccacatct

SEQ ID NO: 7152 - RNA, 20 nt, synthetic construct
  source 1..20: mol_type = other RNA
attctgggggtctgaagtgg

SEQ ID NO: 7153 - RNA, 20 nt, synthetic construct
  source 1..20: mol_type = other RNA
caaaaacaagacctggtcag

SEQ ID NO: 7154 - RNA, 20 nt, synthetic construct
  source 1..20: mol_type = other RNA
caagacctggtcagagccca

SEQ ID NO: 7155 - RNA, 20 nt, synthetic construct
  source 1..20: mol_type = other RNA
caagctgtgagactcagacc

SEQ ID NO: 7156 - RNA, 20 nt, synthetic construct
  source 1..20: mol_type = other RNA
cacagcttgtaaaggtgaga

SEQ ID NO: 7157 - RNA, 20 nt, synthetic construct
  source 1..20: mol_type = other RNA
cacaggagatgtggtgcagg

SEQ ID NO: 7158 - RNA, 20 nt, synthetic construct
  source 1..20: mol_type = other RNA
cacatctcctgtgggctctg

SEQ ID NO: 7159 - RNA, 20 nt, synthetic construct
  source 1..20: mol_type = other RNA
caccacatctcctgtgggct

SEQ ID NO: 7160 - RNA, 20 nt, synthetic construct
  source 1..20: mol_type = other RNA
cacccacttcagacccccag

SEQ ID NO: 7161 - RNA, 20 nt, synthetic construct
  source 1..20: mol_type = other RNA
caccctataattcctcctgc

SEQ ID NO: 7162 - RNA, 20 nt, synthetic construct
  source 1..20: mol_type = other RNA
caccctccacccacttcaga

SEQ ID NO: 7163 - RNA, 20 nt, synthetic construct
  source 1..20: mol_type = other RNA
cacctttacaagctgtgaga

SEQ ID NO: 7164 - RNA, 20 nt, synthetic construct
  source 1..20: mol_type = other RNA
cactgtcgctccctggggta

SEQ ID NO: 7165 - RNA, 20 nt, synthetic construct
  source 1..20: mol_type = other RNA
cacttcagacccccagaatc

SEQ ID NO: 7166 - RNA, 20 nt, synthetic construct
  source 1..20: mol_type = other RNA
cagaatctcacctttacaag

SEQ ID NO: 7167 - RNA, 20 nt, synthetic construct
  source 1..20: mol_type = other RNA
cagacccccagaatctcacc

SEQ ID NO: 7168 - RNA, 20 nt, synthetic construct
  source 1..20: mol_type = other RNA
cagacccctgggcactgtcg

SEQ ID NO: 7169 - RNA, 20 nt, synthetic construct
  source 1..20: mol_type = other RNA
cagagcccacaggagatgtg

SEQ ID NO: 7170 - RNA, 20 nt, synthetic construct
  source 1..20: mol_type = other RNA
cagcttgtaaaggtgagatt

SEQ ID NO: 7171 - RNA, 20 nt, synthetic construct
  source 1..20: mol_type = other RNA
caggagatgtggtgcaggag

SEQ ID NO: 7172 - RNA, 20 nt, synthetic construct
  source 1..20: mol_type = other RNA
cagggagcgacagtgcccag

SEQ ID NO: 7173 - RNA, 20 nt, synthetic construct
  source 1..20: mol_type = other RNA
caggggtctgagtctcacag

SEQ ID NO: 7174 - RNA, 20 nt, synthetic construct
  source 1..20: mol_type = other RNA
caggtcttgtttttgttcta

SEQ ID NO: 7175 - RNA, 20 nt, synthetic construct
  source 1..20: mol_type = other RNA
cagtgcccaggggtctgagt

SEQ ID NO: 7176 - RNA, 20 nt, synthetic construct
  source 1..20: mol_type = other RNA
catctcctgtgggctctgac

SEQ ID NO: 7177 - RNA, 20 nt, synthetic construct
  source 1..20: mol_type = other RNA
ccacaggagatgtggtgcag

SEQ ID NO: 7178 - RNA, 20 nt, synthetic construct
  source 1..20: mol_type = other RNA
ccacatctcctgtgggctct

SEQ ID NO: 7179 - RNA, 20 nt, synthetic construct
  source 1..20: mol_type = other RNA
ccacccacttcagaccccca

SEQ ID NO: 7180 - RNA, 20 nt, synthetic construct
  source 1..20: mol_type = other RNA
ccaccctccacccacttcag

SEQ ID NO: 7181 - RNA, 20 nt, synthetic construct
  source 1..20: mol_type = other RNA
ccacttcagacccccagaat

SEQ ID NO: 7182 - RNA, 20 nt, synthetic construct
  source 1..20: mol_type = other RNA
ccagaatctcacctttacaa

SEQ ID NO: 7183 - RNA, 20 nt, synthetic construct
  source 1..20: mol_type = other RNA
ccagggagcgacagtgccca

SEQ ID NO: 7184 - RNA, 20 nt, synthetic construct
  source 1..20: mol_type = other RNA
ccaggggtctgagtctcaca

SEQ ID NO: 7185 - RNA, 20 nt, synthetic construct
  source 1..20: mol_type = other RNA
ccaggtcttgtttttgttct

SEQ ID NO: 7186 - RNA, 20 nt, synthetic construct
  source 1..20: mol_type = other RNA
cccacaggagatgtggtgca

SEQ ID NO: 7187 - RNA, 20 nt, synthetic construct
  source 1..20: mol_type = other RNA
cccacttcagacccccagaa

SEQ ID NO: 7188 - RNA, 20 nt, synthetic construct
  source 1..20: mol_type = other RNA
cccagaatctcacctttaca

SEQ ID NO: 7189 - RNA, 20 nt, synthetic construct
  source 1..20: mol_type = other RNA
cccagggagcgacagtgccc

SEQ ID NO: 7190 - RNA, 20 nt, synthetic construct
  source 1..20: mol_type = other RNA
cccaggggtctgagtctcac

SEQ ID NO: 7191 - RNA, 20 nt, synthetic construct
  source 1..20: mol_type = other RNA
ccccagaatctcacctttac

SEQ ID NO: 7192 - RNA, 20 nt, synthetic construct
  source 1..20: mol_type = other RNA
ccccagggagcgacagtgcc

SEQ ID NO: 7193 - RNA, 20 nt, synthetic construct
  source 1..20: mol_type = other RNA
cccccagaatctcaccttta

SEQ ID NO: 7194 - RNA, 20 nt, synthetic construct
  source 1..20: mol_type = other RNA
cccctgggcactgtcgctcc

SEQ ID NO: 7195 - RNA, 20 nt, synthetic construct
  source 1..20: mol_type = other RNA
ccctataattcctcctgcac

SEQ ID NO: 7196 - RNA, 20 nt, synthetic construct
  source 1..20: mol_type = other RNA
ccctccacccacttcagacc

SEQ ID NO: 7197 - RNA, 20 nt, synthetic construct
  source 1..20: mol_type = other RNA
ccctgggcactgtcgctccc

SEQ ID NO: 7198 - RNA, 20 nt, synthetic construct
  source 1..20: mol_type = other RNA
ccctggggtagaacaaaaac

SEQ ID NO: 7199 - RNA, 20 nt, synthetic construct
  source 1..20: mol_type = other RNA
cctataattcctcctgcacc

SEQ ID NO: 7200 - RNA, 20 nt, synthetic construct
  source 1..20: mol_type = other RNA
cctccacccacttcagaccc

SEQ ID NO: 7201 - RNA, 20 nt, synthetic construct
  source 1..20: mol_type = other RNA
cctcctgcaccacatctcct

SEQ ID NO: 7202 - RNA, 20 nt, synthetic construct
  source 1..20: mol_type = other RNA
cctgcaccacatctcctgtg

SEQ ID NO: 7203 - RNA, 20 nt, synthetic construct
  source 1..20: mol_type = other RNA
cctgggcactgtcgctccct

SEQ ID NO: 7204 - RNA, 20 nt, synthetic construct
  source 1..20: mol_type = other RNA
cctggggtagaacaaaaaca

SEQ ID NO: 7205 - RNA, 20 nt, synthetic construct
  source 1..20: mol_type = other RNA
cctggtcagagcccacagga

SEQ ID NO: 7206 - RNA, 20 nt, synthetic construct
  source 1..20: mol_type = other RNA
cctgtgggctctgaccaggt

SEQ ID NO: 7207 - RNA, 20 nt, synthetic construct
  source 1..20: mol_type = other RNA
cctttacaagctgtgagact

SEQ ID NO: 7208 - RNA, 20 nt, synthetic construct
  source 1..20: mol_type = other RNA
cgacagtgcccaggggtctg

SEQ ID NO: 7209 - RNA, 20 nt, synthetic construct
  source 1..20: mol_type = other RNA
cgctccctggggtagaacaa

SEQ ID NO: 7210 - RNA, 20 nt, synthetic construct
  source 1..20: mol_type = other RNA
ctaccccagggagcgacagt

SEQ ID NO: 7211 - RNA, 20 nt, synthetic construct
  source 1..20: mol_type = other RNA
ctataattcctcctgcacca

SEQ ID NO: 7212 - RNA, 20 nt, synthetic construct
  source 1..20: mol_type = other RNA
ctcacagcttgtaaaggtga

SEQ ID NO: 7213 - RNA, 20 nt, synthetic construct
  source 1..20: mol_type = other RNA
ctcacctttacaagctgtga

SEQ ID NO: 7214 - RNA, 20 nt, synthetic construct
  source 1..20: mol_type = other RNA
ctcagacccctgggcactgt

SEQ ID NO: 7215 - RNA, 20 nt, synthetic construct
  source 1..20: mol_type = other RNA
ctccacccacttcagacccc

SEQ ID NO: 7216 - RNA, 20 nt, synthetic construct
  source 1..20: mol_type = other RNA
ctccctggggtagaacaaaa

SEQ ID NO: 7217 - RNA, 20 nt, synthetic construct
  source 1..20: mol_type = other RNA
ctcctgcaccacatctcctg

SEQ ID NO: 7218 - RNA, 20 nt, synthetic construct
  source 1..20: mol_type = other RNA
ctcctgtgggctctgaccag

SEQ ID NO: 7219 - RNA, 20 nt, synthetic construct
  source 1..20: mol_type = other RNA
ctctgaccaggtcttgtttt

SEQ ID NO: 7220 - RNA, 20 nt, synthetic construct
  source 1..20: mol_type = other RNA
ctgaccaggtcttgtttttg

SEQ ID NO: 7221 - RNA, 20 nt, synthetic construct
  source 1..20: mol_type = other RNA
ctgagtctcacagcttgtaa

SEQ ID NO: 7222 - RNA, 20 nt, synthetic construct
  source 1..20: mol_type = other RNA
ctgcaccacatctcctgtgg

SEQ ID NO: 7223 - RNA, 20 nt, synthetic construct
  source 1..20: mol_type = other RNA
ctgggcactgtcgctccctg

SEQ ID NO: 7224 - RNA, 20 nt, synthetic construct
  source 1..20: mol_type = other RNA
ctgggggtctgaagtgggtg

SEQ ID NO: 7225 - RNA, 20 nt, synthetic construct
  source 1..20: mol_type = other RNA
ctggggtagaacaaaaacaa

SEQ ID NO: 7226 - RNA, 20 nt, synthetic construct
  source 1..20: mol_type = other RNA
ctggtcagagcccacaggag

SEQ ID NO: 7227 - RNA, 20 nt, synthetic construct
  source 1..20: mol_type = other RNA
ctgtcgctccctggggtaga

SEQ ID NO: 7228 - RNA, 20 nt, synthetic construct
  source 1..20: mol_type = other RNA
ctgtgagactcagacccctg

SEQ ID NO: 7229 - RNA, 20 nt, synthetic construct
  source 1..20: mol_type = other RNA
ctgtgggctctgaccaggtc

SEQ ID NO: 7230 - RNA, 20 nt, synthetic construct
  source 1..20: mol_type = other RNA
cttcagacccccagaatctc

SEQ ID NO: 7231 - RNA, 20 nt, synthetic construct
  source 1..20: mol_type = other RNA
cttgtaaaggtgagattctg

SEQ ID NO: 7232 - RNA, 20 nt, synthetic construct
  source 1..20: mol_type = other RNA
cttgtttttgttctacccca

SEQ ID NO: 7233 - RNA, 20 nt, synthetic construct
  source 1..20: mol_type = other RNA
ctttacaagctgtgagactc

SEQ ID NO: 7234 - RNA, 20 nt, synthetic construct
  source 1..20: mol_type = other RNA
gaacaaaaacaagacctggt

SEQ ID NO: 7235 - RNA, 20 nt, synthetic construct
  source 1..20: mol_type = other RNA
gaatctcacctttacaagct

SEQ ID NO: 7236 - RNA, 20 nt, synthetic construct
  source 1..20: mol_type = other RNA
gacagtgcccaggggtctga

SEQ ID NO: 7237 - RNA, 20 nt, synthetic construct
  source 1..20: mol_type = other RNA
gaccaggtcttgtttttgtt

SEQ ID NO: 7238 - RNA, 20 nt, synthetic construct
  source 1..20: mol_type = other RNA
gacccccagaatctcacctt

SEQ ID NO: 7239 - RNA, 20 nt, synthetic construct
  source 1..20: mol_type = other RNA
gacccctgggcactgtcgct

SEQ ID NO: 7240 - RNA, 20 nt, synthetic construct
  source 1..20: mol_type = other RNA
gacctggtcagagcccacag

SEQ ID NO: 7241 - RNA, 20 nt, synthetic construct
  source 1..20: mol_type = other RNA
gactcagacccctgggcact

SEQ ID NO: 7242 - RNA, 20 nt, synthetic construct
  source 1..20: mol_type = other RNA
gagactcagacccctgggca

SEQ ID NO: 7243 - RNA, 20 nt, synthetic construct
  source 1..20: mol_type = other RNA
gagatgtggtgcaggaggaa

SEQ ID NO: 7244 - RNA, 20 nt, synthetic construct
  source 1..20: mol_type = other RNA
gagattctgggggtctgaag

SEQ ID NO: 7245 - RNA, 20 nt, synthetic construct
  source 1..20: mol_type = other RNA
gagcccacaggagatgtggt

SEQ ID NO: 7246 - RNA, 20 nt, synthetic construct
  source 1..20: mol_type = other RNA
gagcgacagtgcccaggggt

SEQ ID NO: 7247 - RNA, 20 nt, synthetic construct
  source 1..20: mol_type = other RNA
gagtctcacagcttgtaaag

SEQ ID NO: 7248 - RNA, 20 nt, synthetic construct
  source 1..20: mol_type = other RNA
gatgtggtgcaggaggaatt

SEQ ID NO: 7249 - RNA, 20 nt, synthetic construct
  source 1..20: mol_type = other RNA
gattctgggggtctgaagtg

SEQ ID NO: 7250 - RNA, 20 nt, synthetic construct
  source 1..20: mol_type = other RNA
gcaccacatctcctgtgggc

SEQ ID NO: 7251 - RNA, 20 nt, synthetic construct
  source 1..20: mol_type = other RNA
gcactgtcgctccctggggt

SEQ ID NO: 7252 - RNA, 20 nt, synthetic construct
  source 1..20: mol_type = other RNA
gcccacaggagatgtggtgc

SEQ ID NO: 7253 - RNA, 20 nt, synthetic construct
  source 1..20: mol_type = other RNA
gcccaggggtctgagtctca

SEQ ID NO: 7254 - RNA, 20 nt, synthetic construct
  source 1..20: mol_type = other RNA
gcgacagtgcccaggggtct

SEQ ID NO: 7255 - RNA, 20 nt, synthetic construct
  source 1..20: mol_type = other RNA
gctccctggggtagaacaaa

SEQ ID NO: 7256 - RNA, 20 nt, synthetic construct
  source 1..20: mol_type = other RNA
gctctgaccaggtcttgttt

SEQ ID NO: 7257 - RNA, 20 nt, synthetic construct
  source 1..20: mol_type = other RNA
gctgtgagactcagacccct

SEQ ID NO: 7258 - RNA, 20 nt, synthetic construct
  source 1..20: mol_type = other RNA
gcttgtaaaggtgagattct

SEQ ID NO: 7259 - RNA, 20 nt, synthetic construct
  source 1..20: mol_type = other RNA
ggagatgtggtgcaggagga

SEQ ID NO: 7260 - RNA, 20 nt, synthetic construct
  source 1..20: mol_type = other RNA
ggagcgacagtgcccagggg

SEQ ID NO: 7261 - RNA, 20 nt, synthetic construct
  source 1..20: mol_type = other RNA
ggcactgtcgctccctgggg

SEQ ID NO: 7262 - RNA, 20 nt, synthetic construct
  source 1..20: mol_type = other RNA
ggctctgaccaggtcttgtt

SEQ ID NO: 7263 - RNA, 20 nt, synthetic construct
  source 1..20: mol_type = other RNA
gggagcgacagtgcccaggg

SEQ ID NO: 7264 - RNA, 20 nt, synthetic construct
  source 1..20: mol_type = other RNA
gggcactgtcgctccctggg

SEQ ID NO: 7265 - RNA, 20 nt, synthetic construct
  source 1..20: mol_type = other RNA
gggctctgaccaggtcttgt

SEQ ID NO: 7266 - RNA, 20 nt, synthetic construct
  source 1..20: mol_type = other RNA
ggggtagaacaaaaacaaga

SEQ ID NO: 7267 - RNA, 20 nt, synthetic construct
  source 1..20: mol_type = other RNA
ggggtctgagtctcacagct

SEQ ID NO: 7268 - RNA, 20 nt, synthetic construct
  source 1..20: mol_type = other RNA
gggtagaacaaaaacaagac

SEQ ID NO: 7269 - RNA, 20 nt, synthetic construct
  source 1..20: mol_type = other RNA
gggtctgagtctcacagctt

SEQ ID NO: 7270 - RNA, 20 nt, synthetic construct
  source 1..20: mol_type = other RNA
ggtagaacaaaaacaagacc

SEQ ID NO: 7271 - RNA, 20 nt, synthetic construct
  source 1..20: mol_type = other RNA
ggtcagagcccacaggagat

SEQ ID NO: 7272 - RNA, 20 nt, synthetic construct
  source 1..20: mol_type = other RNA
ggtctgagtctcacagcttg

SEQ ID NO: 7273 - RNA, 20 nt, synthetic construct
  source 1..20: mol_type = other RNA
ggtcttgtttttgttctacc

SEQ ID NO: 7274 - RNA, 20 nt, synthetic construct
  source 1..20: mol_type = other RNA
ggtgagattctgggggtctg

SEQ ID NO: 7275 - RNA, 20 nt, synthetic construct
  source 1..20: mol_type = other RNA
gtaaaggtgagattctgggg

SEQ ID NO: 7276 - RNA, 20 nt, synthetic construct
  source 1..20: mol_type = other RNA
gtagaacaaaaacaagacct

SEQ ID NO: 7277 - RNA, 20 nt, synthetic construct
  source 1..20: mol_type = other RNA
gtcagagcccacaggagatg

SEQ ID NO: 7278 - RNA, 20 nt, synthetic construct
  source 1..20: mol_type = other RNA
gtcgctccctggggtagaac

SEQ ID NO: 7279 - RNA, 20 nt, synthetic construct
  source 1..20: mol_type = other RNA
gtctcacagcttgtaaaggt

SEQ ID NO: 7280 - RNA, 20 nt, synthetic construct
  source 1..20: mol_type = other RNA
gtctgagtctcacagcttgt

SEQ ID NO: 7281 - RNA, 20 nt, synthetic construct
  source 1..20: mol_type = other RNA
gtcttgtttttgttctaccc

SEQ ID NO: 7282 - RNA, 20 nt, synthetic construct
  source 1..20: mol_type = other RNA
gtgagactcagacccctggg

SEQ ID NO: 7283 - RNA, 20 nt, synthetic construct
  source 1..20: mol_type = other RNA
gtgagattctgggggtctga

SEQ ID NO: 7284 - RNA, 20 nt, synthetic construct
  source 1..20: mol_type = other RNA
gtgcccaggggtctgagtct

SEQ ID NO: 7285 - RNA, 20 nt, synthetic construct
  source 1..20: mol_type = other RNA
gtgggctctgaccaggtctt

SEQ ID NO: 7286 - RNA, 20 nt, synthetic construct
  source 1..20: mol_type = other RNA
gttctaccccagggagcgac

SEQ ID NO: 7287 - RNA, 20 nt, synthetic construct
  source 1..20: mol_type = other RNA
gtttttgttctaccccaggg

SEQ ID NO: 7288 - RNA, 20 nt, synthetic construct
  source 1..20: mol_type = other RNA
taaaggtgagattctggggg

SEQ ID NO: 7289 - RNA, 20 nt, synthetic construct
  source 1..20: mol_type = other RNA
taattcctcctgcaccacat

SEQ ID NO: 7290 - RNA, 20 nt, synthetic construct
  source 1..20: mol_type = other RNA
tacaagctgtgagactcaga

SEQ ID NO: 7291 - RNA, 20 nt, synthetic construct
  source 1..20: mol_type = other RNA
taccccagggagcgacagtg

SEQ ID NO: 7292 - RNA, 20 nt, synthetic construct
  source 1..20: mol_type = other RNA
tagaacaaaaacaagacctg

SEQ ID NO: 7293 - RNA, 20 nt, synthetic construct
  source 1..20: mol_type = other RNA
tataattcctcctgcaccac

SEQ ID NO: 7294 - RNA, 20 nt, synthetic construct
  source 1..20: mol_type = other RNA
tcacagcttgtaaaggtgag

SEQ ID NO: 7295 - RNA, 20 nt, synthetic construct
  source 1..20: mol_type = other RNA
tcacctttacaagctgtgag

SEQ ID NO: 7296 - RNA, 20 nt, synthetic construct
  source 1..20: mol_type = other RNA
tcagacccccagaatctcac

SEQ ID NO: 7297 - RNA, 20 nt, synthetic construct
  source 1..20: mol_type = other RNA
tcagacccctgggcactgtc

SEQ ID NO: 7298 - RNA, 20 nt, synthetic construct
  source 1..20: mol_type = other RNA
tcagagcccacaggagatgt

SEQ ID NO: 7299 - RNA, 20 nt, synthetic construct
  source 1..20: mol_type = other RNA
tccacccacttcagaccccc

SEQ ID NO: 7300 - RNA, 20 nt, synthetic construct
  source 1..20: mol_type = other RNA
tccctggggtagaacaaaaa

SEQ ID NO: 7301 - RNA, 20 nt, synthetic construct
  source 1..20: mol_type = other RNA
tcctcctgcaccacatctcc

SEQ ID NO: 7302 - RNA, 20 nt, synthetic construct
  source 1..20: mol_type = other RNA
tcctgcaccacatctcctgt

SEQ ID NO: 7303 - RNA, 20 nt, synthetic construct
  source 1..20: mol_type = other RNA
tcctgtgggctctgaccagg

SEQ ID NO: 7304 - RNA, 20 nt, synthetic construct
  source 1..20: mol_type = other RNA
tcgctccctggggtagaaca

SEQ ID NO: 7305 - RNA, 20 nt, synthetic construct
  source 1..20: mol_type = other RNA
tctaccccagggagcgacag

SEQ ID NO: 7306 - RNA, 20 nt, synthetic construct
  source 1..20: mol_type = other RNA
tctcacagcttgtaaaggtg

SEQ ID NO: 7307 - RNA, 20 nt, synthetic construct
  source 1..20: mol_type = other RNA
tctcacctttacaagctgtg

SEQ ID NO: 7308 - RNA, 20 nt, synthetic construct
  source 1..20: mol_type = other RNA
tctcctgtgggctctgacca

SEQ ID NO: 7309 - RNA, 20 nt, synthetic construct
  source 1..20: mol_type = other RNA
tctgaccaggtcttgttttt

SEQ ID NO: 7310 - RNA, 20 nt, synthetic construct
  source 1..20: mol_type = other RNA
tctgagtctcacagcttgta

SEQ ID NO: 7311 - RNA, 20 nt, synthetic construct
  source 1..20: mol_type = other RNA
tctgggggtctgaagtgggt

SEQ ID NO: 7312 - RNA, 20 nt, synthetic construct
  source 1..20: mol_type = other RNA
tcttgtttttgttctacccc

SEQ ID NO: 7313 - RNA, 20 nt, synthetic construct
  source 1..20: mol_type = other RNA
tgaccaggtcttgtttttgt

SEQ ID NO: 7314 - RNA, 20 nt, synthetic construct
  source 1..20: mol_type = other RNA
tgagactcagacccctgggc

SEQ ID NO: 7315 - RNA, 20 nt, synthetic construct
  source 1..20: mol_type = other RNA
tgagattctgggggtctgaa

SEQ ID NO: 7316 - RNA, 20 nt, synthetic construct
  source 1..20: mol_type = other RNA
tgagtctcacagcttgtaaa

SEQ ID NO: 7317 - RNA, 20 nt, synthetic construct
  source 1..20: mol_type = other RNA
tgcaccacatctcctgtggg

SEQ ID NO: 7318 - RNA, 20 nt, synthetic construct
  source 1..20: mol_type = other RNA
tgcccaggggtctgagtctc

SEQ ID NO: 7319 - RNA, 20 nt, synthetic construct
  source 1..20: mol_type = other RNA
tgggcactgtcgctccctgg

SEQ ID NO: 7320 - RNA, 20 nt, synthetic construct
  source 1..20: mol_type = other RNA
tgggctctgaccaggtcttg

SEQ ID NO: 7321 - RNA, 20 nt, synthetic construct
  source 1..20: mol_type = other RNA
tggggtagaacaaaaacaag

SEQ ID NO: 7322 - RNA, 20 nt, synthetic construct
  source 1..20: mol_type = other RNA
tggtcagagcccacaggaga

SEQ ID NO: 7323 - RNA, 20 nt, synthetic construct
  source 1..20: mol_type = other RNA
tgtaaaggtgagattctggg

SEQ ID NO: 7324 - RNA, 20 nt, synthetic construct
  source 1..20: mol_type = other RNA
tgtcgctccctggggtagaa

SEQ ID NO: 7325 - RNA, 20 nt, synthetic construct
  source 1..20: mol_type = other RNA
tgtgagactcagacccctgg

SEQ ID NO: 7326 - RNA, 20 nt, synthetic construct
  source 1..20: mol_type = other RNA
tgtgggctctgaccaggtct

SEQ ID NO: 7327 - RNA, 20 nt, synthetic construct
  source 1..20: mol_type = other RNA
tgttctaccccagggagcga

SEQ ID NO: 7328 - RNA, 20 nt, synthetic construct
  source 1..20: mol_type = other RNA
tgtttttgttctaccccagg

SEQ ID NO: 7329 - RNA, 20 nt, synthetic construct
  source 1..20: mol_type = other RNA
ttacaagctgtgagactcag

SEQ ID NO: 7330 - RNA, 20 nt, synthetic construct
  source 1..20: mol_type = other RNA
ttcagacccccagaatctca

SEQ ID NO: 7331 - RNA, 20 nt, synthetic construct
  source 1..20: mol_type = other RNA
ttcctcctgcaccacatctc

SEQ ID NO: 7332 - RNA, 20 nt, synthetic construct
  source 1..20: mol_type = other RNA
ttctaccccagggagcgaca

SEQ ID NO: 7333 - RNA, 20 nt, synthetic construct
  source 1..20: mol_type = other RNA
ttctgggggtctgaagtggg

SEQ ID NO: 7334 - RNA, 20 nt, synthetic construct
  source 1..20: mol_type = other RNA
ttgtaaaggtgagattctgg

SEQ ID NO: 7335 - RNA, 20 nt, synthetic construct
  source 1..20: mol_type = other RNA
ttgttctaccccagggagcg

SEQ ID NO: 7336 - RNA, 20 nt, synthetic construct
  source 1..20: mol_type = other RNA
ttgtttttgttctaccccag

SEQ ID NO: 7337 - RNA, 20 nt, synthetic construct
  source 1..20: mol_type = other RNA
tttacaagctgtgagactca

SEQ ID NO: 7338 - RNA, 20 nt, synthetic construct
  source 1..20: mol_type = other RNA
tttgttctaccccagggagc

SEQ ID NO: 7339 - RNA, 20 nt, synthetic construct
  source 1..20: mol_type = other RNA
ttttgttctaccccagggag

SEQ ID NO: 7340 - RNA, 20 nt, synthetic construct
  source 1..20: mol_type = other RNA
tttttgttctaccccaggga

SEQ ID NO: 7341 - RNA, 21 nt, synthetic construct
  source 1..21: mol_type = other RNA
aaaaacaagacctggtcagag

SEQ ID NO: 7342 - RNA, 21 nt, synthetic construct
  source 1..21: mol_type = other RNA
aaaacaagacctggtcagagc

SEQ ID NO: 7343 - RNA, 21 nt, synthetic construct
  source 1..21: mol_type = other RNA
aaacaagacctggtcagagcc

SEQ ID NO: 7344 - RNA, 21 nt, synthetic construct
  source 1..21: mol_type = other RNA
aaaggtgagattctgggggtc

SEQ ID NO: 7345 - RNA, 21 nt, synthetic construct
  source 1..21: mol_type = other RNA
aacaaaaacaagacctggtca

SEQ ID NO: 7346 - RNA, 21 nt, synthetic construct
  source 1..21: mol_type = other RNA
aacaagacctggtcagagccc

SEQ ID NO: 7347 - RNA, 21 nt, synthetic construct
  source 1..21: mol_type = other RNA
aagacctggtcagagcccaca

SEQ ID NO: 7348 - RNA, 21 nt, synthetic construct
  source 1..21: mol_type = other RNA
aagctgtgagactcagacccc

SEQ ID NO: 7349 - RNA, 21 nt, synthetic construct
  source 1..21: mol_type = other RNA
aaggtgagattctgggggtct

SEQ ID NO: 7350 - RNA, 21 nt, synthetic construct
  source 1..21: mol_type = other RNA
aatctcacctttacaagctgt

SEQ ID NO: 7351 - RNA, 21 nt, synthetic construct
  source 1..21: mol_type = other RNA
aattcctcctgcaccacatct

SEQ ID NO: 7352 - RNA, 21 nt, synthetic construct
  source 1..21: mol_type = other RNA
acaaaaacaagacctggtcag

SEQ ID NO: 7353 - RNA, 21 nt, synthetic construct
  source 1..21: mol_type = other RNA
acaagacctggtcagagccca

SEQ ID NO: 7354 - RNA, 21 nt, synthetic construct
  source 1..21: mol_type = other RNA
acaagctgtgagactcagacc

SEQ ID NO: 7355 - RNA, 21 nt, synthetic construct
  source 1..21: mol_type = other RNA
acagcttgtaaaggtgagatt

SEQ ID NO: 7356 - RNA, 21 nt, synthetic construct
  source 1..21: mol_type = other RNA
acaggagatgtggtgcaggag

SEQ ID NO: 7357 - RNA, 21 nt, synthetic construct
  source 1..21: mol_type = other RNA
acagtgcccaggggtctgagt

SEQ ID NO: 7358 - RNA, 21 nt, synthetic construct
  source 1..21: mol_type = other RNA
acatctcctgtgggctctgac

SEQ ID NO: 7359 - RNA, 21 nt, synthetic construct
  source 1..21: mol_type = other RNA
accacatctcctgtgggctct

SEQ ID NO: 7360 - RNA, 21 nt, synthetic construct
  source 1..21: mol_type = other RNA
accaggtcttgtttttgttct

SEQ ID NO: 7361 - RNA, 21 nt, synthetic construct
  source 1..21: mol_type = other RNA
acccacttcagacccccagaa

SEQ ID NO: 7362 - RNA, 21 nt, synthetic construct
  source 1..21: mol_type = other RNA
accccagggagcgacagtgcc

SEQ ID NO: 7363 - RNA, 21 nt, synthetic construct
  source 1..21: mol_type = other RNA
acccccagaatctcaccttta

SEQ ID NO: 7364 - RNA, 21 nt, synthetic construct
  source 1..21: mol_type = other RNA
acccctgggcactgtcgctcc

SEQ ID NO: 7365 - RNA, 21 nt, synthetic construct
  source 1..21: mol_type = other RNA
accctataattcctcctgcac

SEQ ID NO: 7366 - RNA, 21 nt, synthetic construct
  source 1..21: mol_type = other RNA
accctccacccacttcagacc

SEQ ID NO: 7367 - RNA, 21 nt, synthetic construct
  source 1..21: mol_type = other RNA
acctggtcagagcccacagga

SEQ ID NO: 7368 - RNA, 21 nt, synthetic construct
  source 1..21: mol_type = other RNA
acctttacaagctgtgagact

SEQ ID NO: 7369 - RNA, 21 nt, synthetic construct
  source 1..21: mol_type = other RNA
actcagacccctgggcactgt

SEQ ID NO: 7370 - RNA, 21 nt, synthetic construct
  source 1..21: mol_type = other RNA
actgtcgctccctggggtaga

SEQ ID NO: 7371 - RNA, 21 nt, synthetic construct
  source 1..21: mol_type = other RNA
acttcagacccccagaatctc

SEQ ID NO: 7372 - RNA, 21 nt, synthetic construct
  source 1..21: mol_type = other RNA
agaacaaaaacaagacctggt

SEQ ID NO: 7373 - RNA, 21 nt, synthetic construct
  source 1..21: mol_type = other RNA
agaatctcacctttacaagct

SEQ ID NO: 7374 - RNA, 21 nt, synthetic construct
  source 1..21: mol_type = other RNA
agacccccagaatctcacctt

SEQ ID NO: 7375 - RNA, 21 nt, synthetic construct
  source 1..21: mol_type = other RNA
agacccctgggcactgtcgct

SEQ ID NO: 7376 - RNA, 21 nt, synthetic construct
  source 1..21: mol_type = other RNA
agacctggtcagagcccacag

SEQ ID NO: 7377 - RNA, 21 nt, synthetic construct
  source 1..21: mol_type = other RNA
agactcagacccctgggcact

SEQ ID NO: 7378 - RNA, 21 nt, synthetic construct
  source 1..21: mol_type = other RNA
agagcccacaggagatgtggt

SEQ ID NO: 7379 - RNA, 21 nt, synthetic construct
  source 1..21: mol_type = other RNA
agatgtggtgcaggaggaatt

SEQ ID NO: 7380 - RNA, 21 nt, synthetic construct
  source 1..21: mol_type = other RNA
agattctgggggtctgaagtg

SEQ ID NO: 7381 - RNA, 21 nt, synthetic construct
  source 1..21: mol_type = other RNA
agcccacaggagatgtggtgc

SEQ ID NO: 7382 - RNA, 21 nt, synthetic construct
  source 1..21: mol_type = other RNA
agcgacagtgcccaggggtct

SEQ ID NO: 7383 - RNA, 21 nt, synthetic construct
  source 1..21: mol_type = other RNA
agctgtgagactcagacccct

SEQ ID NO: 7384 - RNA, 21 nt, synthetic construct
  source 1..21: mol_type = other RNA
agcttgtaaaggtgagattct

SEQ ID NO: 7385 - RNA, 21 nt, synthetic construct
  source 1..21: mol_type = other RNA
aggagatgtggtgcaggagga

SEQ ID NO: 7386 - RNA, 21 nt, synthetic construct
  source 1..21: mol_type = other RNA
agggagcgacagtgcccaggg

SEQ ID NO: 7387 - RNA, 21 nt, synthetic construct
  source 1..21: mol_type = other RNA
aggggtctgagtctcacagct

SEQ ID NO: 7388 - RNA, 21 nt, synthetic construct
  source 1..21: mol_type = other RNA
aggtcttgtttttgttctacc

SEQ ID NO: 7389 - RNA, 21 nt, synthetic construct
  source 1..21: mol_type = other RNA
aggtgagattctgggggtctg

SEQ ID NO: 7390 - RNA, 21 nt, synthetic construct
  source 1..21: mol_type = other RNA
agtctcacagcttgtaaaggt

SEQ ID NO: 7391 - RNA, 21 nt, synthetic construct
  source 1..21: mol_type = other RNA
agtgcccaggggtctgagtct

SEQ ID NO: 7392 - RNA, 21 nt, synthetic construct
  source 1..21: mol_type = other RNA
ataattcctcctgcaccacat

SEQ ID NO: 7393 - RNA, 21 nt, synthetic construct
  source 1..21: mol_type = other RNA
atctcacctttacaagctgtg

SEQ ID NO: 7394 - RNA, 21 nt, synthetic construct
  source 1..21: mol_type = other RNA
atctcctgtgggctctgacca

SEQ ID NO: 7395 - RNA, 21 nt, synthetic construct
  source 1..21: mol_type = other RNA
attcctcctgcaccacatctc

SEQ ID NO: 7396 - RNA, 21 nt, synthetic construct
  source 1..21: mol_type = other RNA
attctgggggtctgaagtggg

SEQ ID NO: 7397 - RNA, 21 nt, synthetic construct
  source 1..21: mol_type = other RNA
caaaaacaagacctggtcaga

SEQ ID NO: 7398 - RNA, 21 nt, synthetic construct
  source 1..21: mol_type = other RNA
caagacctggtcagagcccac

SEQ ID NO: 7399 - RNA, 21 nt, synthetic construct
  source 1..21: mol_type = other RNA
caagctgtgagactcagaccc

SEQ ID NO: 7400 - RNA, 21 nt, synthetic construct
  source 1..21: mol_type = other RNA
cacagcttgtaaaggtgagat

SEQ ID NO: 7401 - RNA, 21 nt, synthetic construct
  source 1..21: mol_type = other RNA
cacaggagatgtggtgcagga

SEQ ID NO: 7402 - RNA, 21 nt, synthetic construct
  source 1..21: mol_type = other RNA
cacatctcctgtgggctctga

SEQ ID NO: 7403 - RNA, 21 nt, synthetic construct
  source 1..21: mol_type = other RNA
caccacatctcctgtgggctc

SEQ ID NO: 7404 - RNA, 21 nt, synthetic construct
  source 1..21: mol_type = other RNA
cacccacttcagacccccaga

SEQ ID NO: 7405 - RNA, 21 nt, synthetic construct
  source 1..21: mol_type = other RNA
caccctataattcctcctgca

SEQ ID NO: 7406 - RNA, 21 nt, synthetic construct
  source 1..21: mol_type = other RNA
caccctccacccacttcagac

SEQ ID NO: 7407 - RNA, 21 nt, synthetic construct
  source 1..21: mol_type = other RNA
cacctttacaagctgtgagac

SEQ ID NO: 7408 - RNA, 21 nt, synthetic construct
  source 1..21: mol_type = other RNA
cactgtcgctccctggggtag

SEQ ID NO: 7409 - RNA, 21 nt, synthetic construct
  source 1..21: mol_type = other RNA
cacttcagacccccagaatct

SEQ ID NO: 7410 - RNA, 21 nt, synthetic construct
  source 1..21: mol_type = other RNA
cagaatctcacctttacaagc

SEQ ID NO: 7411 - RNA, 21 nt, synthetic construct
  source 1..21: mol_type = other RNA
cagacccccagaatctcacct

SEQ ID NO: 7412 - RNA, 21 nt, synthetic construct
  source 1..21: mol_type = other RNA
cagacccctgggcactgtcgc

SEQ ID NO: 7413 - RNA, 21 nt, synthetic construct
  source 1..21: mol_type = other RNA
cagagcccacaggagatgtgg

SEQ ID NO: 7414 - RNA, 21 nt, synthetic construct
  source 1..21: mol_type = other RNA
cagcttgtaaaggtgagattc

SEQ ID NO: 7415 - RNA, 21 nt, synthetic construct
  source 1..21: mol_type = other RNA
caggagatgtggtgcaggagg

SEQ ID NO: 7416 - RNA, 21 nt, synthetic construct
  source 1..21: mol_type = other RNA
cagggagcgacagtgcccagg

SEQ ID NO: 7417 - RNA, 21 nt, synthetic construct
  source 1..21: mol_type = other RNA
caggggtctgagtctcacagc

SEQ ID NO: 7418 - RNA, 21 nt, synthetic construct
  source 1..21: mol_type = other RNA
caggtcttgtttttgttctac

SEQ ID NO: 7419 - RNA, 21 nt, synthetic construct
  source 1..21: mol_type = other RNA
cagtgcccaggggtctgagtc

SEQ ID NO: 7420 - RNA, 21 nt, synthetic construct
  source 1..21: mol_type = other RNA
catctcctgtgggctctgacc

SEQ ID NO: 7421 - RNA, 21 nt, synthetic construct
  source 1..21: mol_type = other RNA
ccacaggagatgtggtgcagg

SEQ ID NO: 7422 - RNA, 21 nt, synthetic construct
  source 1..21: mol_type = other RNA
ccacatctcctgtgggctctg

SEQ ID NO: 7423 - RNA, 21 nt, synthetic construct
  source 1..21: mol_type = other RNA
ccacccacttcagacccccag

SEQ ID NO: 7424 - RNA, 21 nt, synthetic construct
  source 1..21: mol_type = other RNA
ccaccctccacccacttcaga

SEQ ID NO: 7425 - RNA, 21 nt, synthetic construct
  source 1..21: mol_type = other RNA
ccacttcagacccccagaatc

SEQ ID NO: 7426 - RNA, 21 nt, synthetic construct
  source 1..21: mol_type = other RNA
ccagaatctcacctttacaag

SEQ ID NO: 7427 - RNA, 21 nt, synthetic construct
  source 1..21: mol_type = other RNA
ccagggagcgacagtgcccag

SEQ ID NO: 7428 - RNA, 21 nt, synthetic construct
  source 1..21: mol_type = other RNA
ccaggggtctgagtctcacag

SEQ ID NO: 7429 - RNA, 21 nt, synthetic construct
  source 1..21: mol_type = other RNA
ccaggtcttgtttttgttcta

SEQ ID NO: 7430 - RNA, 21 nt, synthetic construct
  source 1..21: mol_type = other RNA
cccacaggagatgtggtgcag

SEQ ID NO: 7431 - RNA, 21 nt, synthetic construct
  source 1..21: mol_type = other RNA
cccacttcagacccccagaat

SEQ ID NO: 7432 - RNA, 21 nt, synthetic construct
  source 1..21: mol_type = other RNA
cccagaatctcacctttacaa

SEQ ID NO: 7433 - RNA, 21 nt, synthetic construct
  source 1..21: mol_type = other RNA
cccagggagcgacagtgccca

SEQ ID NO: 7434 - RNA, 21 nt, synthetic construct
  source 1..21: mol_type = other RNA
cccaggggtctgagtctcaca

SEQ ID NO: 7435 - RNA, 21 nt, synthetic construct
  source 1..21: mol_type = other RNA
ccccagaatctcacctttaca

SEQ ID NO: 7436 - RNA, 21 nt, synthetic construct
  source 1..21: mol_type = other RNA
ccccagggagcgacagtgccc

SEQ ID NO: 7437 - RNA, 21 nt, synthetic construct
  source 1..21: mol_type = other RNA
cccccagaatctcacctttac

SEQ ID NO: 7438 - RNA, 21 nt, synthetic construct
  source 1..21: mol_type = other RNA
cccctgggcactgtcgctccc

SEQ ID NO: 7439 - RNA, 21 nt, synthetic construct
  source 1..21: mol_type = other RNA
ccctataattcctcctgcacc

SEQ ID NO: 7440 - RNA, 21 nt, synthetic construct
  source 1..21: mol_type = other RNA
ccctccacccacttcagaccc

SEQ ID NO: 7441 - RNA, 21 nt, synthetic construct
  source 1..21: mol_type = other RNA
ccctgggcactgtcgctccct

SEQ ID NO: 7442 - RNA, 21 nt, synthetic construct
  source 1..21: mol_type = other RNA
ccctggggtagaacaaaaaca

SEQ ID NO: 7443 - RNA, 21 nt, synthetic construct
  source 1..21: mol_type = other RNA
cctataattcctcctgcacca

SEQ ID NO: 7444 - RNA, 21 nt, synthetic construct
  source 1..21: mol_type = other RNA
cctccacccacttcagacccc

SEQ ID NO: 7445 - RNA, 21 nt, synthetic construct
  source 1..21: mol_type = other RNA
cctcctgcaccacatctcctg

SEQ ID NO: 7446 - RNA, 21 nt, synthetic construct
  source 1..21: mol_type = other RNA
cctgcaccacatctcctgtgg

SEQ ID NO: 7447 - RNA, 21 nt, synthetic construct
  source 1..21: mol_type = other RNA
cctgggcactgtcgctccctg

SEQ ID NO: 7448 - RNA, 21 nt, synthetic construct
  source 1..21: mol_type = other RNA
cctggggtagaacaaaaacaa

SEQ ID NO: 7449 - RNA, 21 nt, synthetic construct
  source 1..21: mol_type = other RNA
cctggtcagagcccacaggag

SEQ ID NO: 7450 - RNA, 21 nt, synthetic construct
  source 1..21: mol_type = other RNA
cctgtgggctctgaccaggtc

SEQ ID NO: 7451 - RNA, 21 nt, synthetic construct
  source 1..21: mol_type = other RNA
cctttacaagctgtgagactc

SEQ ID NO: 7452 - RNA, 21 nt, synthetic construct
  source 1..21: mol_type = other RNA
cgacagtgcccaggggtctga

SEQ ID NO: 7453 - RNA, 21 nt, synthetic construct
  source 1..21: mol_type = other RNA
cgctccctggggtagaacaaa

SEQ ID NO: 7454 - RNA, 21 nt, synthetic construct
  source 1..21: mol_type = other RNA
ctaccccagggagcgacagtg

SEQ ID NO: 7455 - RNA, 21 nt, synthetic construct
  source 1..21: mol_type = other RNA
ctataattcctcctgcaccac

SEQ ID NO: 7456 - RNA, 21 nt, synthetic construct
  source 1..21: mol_type = other RNA
ctcacagcttgtaaaggtgag

SEQ ID NO: 7457 - RNA, 21 nt, synthetic construct
  source 1..21: mol_type = other RNA
ctcacctttacaagctgtgag

SEQ ID NO: 7458 - RNA, 21 nt, synthetic construct
  source 1..21: mol_type = other RNA
ctcagacccctgggcactgtc

SEQ ID NO: 7459 - RNA, 21 nt, synthetic construct
  source 1..21: mol_type = other RNA
ctccacccacttcagaccccc

SEQ ID NO: 7460 - RNA, 21 nt, synthetic construct
  source 1..21: mol_type = other RNA
ctccctggggtagaacaaaaa

SEQ ID NO: 7461 - RNA, 21 nt, synthetic construct
  source 1..21: mol_type = other RNA
ctcctgcaccacatctcctgt

SEQ ID NO: 7462 - RNA, 21 nt, synthetic construct
  source 1..21: mol_type = other RNA
ctcctgtgggctctgaccagg

SEQ ID NO: 7463 - RNA, 21 nt, synthetic construct
  source 1..21: mol_type = other RNA
ctctgaccaggtcttgttttt

SEQ ID NO: 7464 - RNA, 21 nt, synthetic construct
  source 1..21: mol_type = other RNA
ctgaccaggtcttgtttttgt

SEQ ID NO: 7465 - RNA, 21 nt, synthetic construct
  source 1..21: mol_type = other RNA
ctgagtctcacagcttgtaaa

SEQ ID NO: 7466 - RNA, 21 nt, synthetic construct
  source 1..21: mol_type = other RNA
ctgcaccacatctcctgtggg

SEQ ID NO: 7467 - RNA, 21 nt, synthetic construct
  source 1..21: mol_type = other RNA
ctgggcactgtcgctccctgg

SEQ ID NO: 7468 - RNA, 21 nt, synthetic construct
  source 1..21: mol_type = other RNA
ctggggtagaacaaaaacaag

SEQ ID NO: 7469 - RNA, 21 nt, synthetic construct
  source 1..21: mol_type = other RNA
ctggtcagagcccacaggaga

SEQ ID NO: 7470 - RNA, 21 nt, synthetic construct
  source 1..21: mol_type = other RNA
ctgtcgctccctggggtagaa

SEQ ID NO: 7471 - RNA, 21 nt, synthetic construct
  source 1..21: mol_type = other RNA
ctgtgagactcagacccctgg

SEQ ID NO: 7472 - RNA, 21 nt, synthetic construct
  source 1..21: mol_type = other RNA
ctgtgggctctgaccaggtct

SEQ ID NO: 7473 - RNA, 21 nt, synthetic construct
  source 1..21: mol_type = other RNA
cttcagacccccagaatctca

SEQ ID NO: 7474 - RNA, 21 nt, synthetic construct
  source 1..21: mol_type = other RNA
cttgtaaaggtgagattctgg

SEQ ID NO: 7475 - RNA, 21 nt, synthetic construct
  source 1..21: mol_type = other RNA
cttgtttttgttctaccccag

SEQ ID NO: 7476 - RNA, 21 nt, synthetic construct
  source 1..21: mol_type = other RNA
ctttacaagctgtgagactca

SEQ ID NO: 7477 - RNA, 21 nt, synthetic construct
  source 1..21: mol_type = other RNA
gaacaaaaacaagacctggtc

SEQ ID NO: 7478 - RNA, 21 nt, synthetic construct
  source 1..21: mol_type = other RNA
gaatctcacctttacaagctg

SEQ ID NO: 7479 - RNA, 21 nt, synthetic construct
  source 1..21: mol_type = other RNA
gacagtgcccaggggtctgag

SEQ ID NO: 7480 - RNA, 21 nt, synthetic construct
  source 1..21: mol_type = other RNA
gaccaggtcttgtttttgttc

SEQ ID NO: 7481 - RNA, 21 nt, synthetic construct
  source 1..21: mol_type = other RNA
gacccccagaatctcaccttt

SEQ ID NO: 7482 - RNA, 21 nt, synthetic construct
  source 1..21: mol_type = other RNA
gacccctgggcactgtcgctc

SEQ ID NO: 7483 - RNA, 21 nt, synthetic construct
  source 1..21: mol_type = other RNA
gacctggtcagagcccacagg

SEQ ID NO: 7484 - RNA, 21 nt, synthetic construct
  source 1..21: mol_type = other RNA
gactcagacccctgggcactg

SEQ ID NO: 7485 - RNA, 21 nt, synthetic construct
  source 1..21: mol_type = other RNA
gagactcagacccctgggcac

SEQ ID NO: 7486 - RNA, 21 nt, synthetic construct
  source 1..21: mol_type = other RNA
gagatgtggtgcaggaggaat

SEQ ID NO: 7487 - RNA, 21 nt, synthetic construct
  source 1..21: mol_type = other RNA
gagattctgggggtctgaagt

SEQ ID NO: 7488 - RNA, 21 nt, synthetic construct
  source 1..21: mol_type = other RNA
gagcccacaggagatgtggtg

SEQ ID NO: 7489 - RNA, 21 nt, synthetic construct
  source 1..21: mol_type = other RNA
gagcgacagtgcccaggggtc

SEQ ID NO: 7490 - RNA, 21 nt, synthetic construct
  source 1..21: mol_type = other RNA
gagtctcacagcttgtaaagg

SEQ ID NO: 7491 - RNA, 21 nt, synthetic construct
  source 1..21: mol_type = other RNA
gattctgggggtctgaagtgg

SEQ ID NO: 7492 - RNA, 21 nt, synthetic construct
  source 1..21: mol_type = other RNA
gcaccacatctcctgtgggct

SEQ ID NO: 7493 - RNA, 21 nt, synthetic construct
  source 1..21: mol_type = other RNA
gcactgtcgctccctggggta

SEQ ID NO: 7494 - RNA, 21 nt, synthetic construct
  source 1..21: mol_type = other RNA
gcccacaggagatgtggtgca

SEQ ID NO: 7495 - RNA, 21 nt, synthetic construct
  source 1..21: mol_type = other RNA
gcccaggggtctgagtctcac

SEQ ID NO: 7496 - RNA, 21 nt, synthetic construct
  source 1..21: mol_type = other RNA
gcgacagtgcccaggggtctg

SEQ ID NO: 7497 - RNA, 21 nt, synthetic construct
  source 1..21: mol_type = other RNA
gctccctggggtagaacaaaa

SEQ ID NO: 7498 - RNA, 21 nt, synthetic construct
  source 1..21: mol_type = other RNA
gctctgaccaggtcttgtttt

SEQ ID NO: 7499 - RNA, 21 nt, synthetic construct
  source 1..21: mol_type = other RNA
gctgtgagactcagacccctg

SEQ ID NO: 7500 - RNA, 21 nt, synthetic construct
  source 1..21: mol_type = other RNA
gcttgtaaaggtgagattctg

SEQ ID NO: 7501 - RNA, 21 nt, synthetic construct
  source 1..21: mol_type = other RNA
ggagatgtggtgcaggaggaa

SEQ ID NO: 7502 - RNA, 21 nt, synthetic construct
  source 1..21: mol_type = other RNA
ggagcgacagtgcccaggggt

SEQ ID NO: 7503 - RNA, 21 nt, synthetic construct
  source 1..21: mol_type = other RNA
ggcactgtcgctccctggggt

SEQ ID NO: 7504 - RNA, 21 nt, synthetic construct
  source 1..21: mol_type = other RNA
ggctctgaccaggtcttgttt

SEQ ID NO: 7505 - RNA, 21 nt, synthetic construct
  source 1..21: mol_type = other RNA
gggagcgacagtgcccagggg

SEQ ID NO: 7506 - RNA, 21 nt, synthetic construct
  source 1..21: mol_type = other RNA
gggcactgtcgctccctgggg

SEQ ID NO: 7507 - RNA, 21 nt, synthetic construct
  source 1..21: mol_type = other RNA
gggctctgaccaggtcttgtt

SEQ ID NO: 7508 - RNA, 21 nt, synthetic construct
  source 1..21: mol_type = other RNA
ggggtagaacaaaaacaagac

SEQ ID NO: 7509 - RNA, 21 nt, synthetic construct
  source 1..21: mol_type = other RNA
ggggtctgagtctcacagctt

SEQ ID NO: 7510 - RNA, 21 nt, synthetic construct
  source 1..21: mol_type = other RNA
gggtagaacaaaaacaagacc

SEQ ID NO: 7511 - RNA, 21 nt, synthetic construct
  source 1..21: mol_type = other RNA
gggtctgagtctcacagcttg

SEQ ID NO: 7512 - RNA, 21 nt, synthetic construct
  source 1..21: mol_type = other RNA
ggtagaacaaaaacaagacct

SEQ ID NO: 7513 - RNA, 21 nt, synthetic construct
  source 1..21: mol_type = other RNA
ggtcagagcccacaggagatg

SEQ ID NO: 7514 - RNA, 21 nt, synthetic construct
  source 1..21: mol_type = other RNA
ggtctgagtctcacagcttgt

SEQ ID NO: 7515 - RNA, 21 nt, synthetic construct
  source 1..21: mol_type = other RNA
ggtcttgtttttgttctaccc

SEQ ID NO: 7516 - RNA, 21 nt, synthetic construct
  source 1..21: mol_type = other RNA
ggtgagattctgggggtctga

SEQ ID NO: 7517 - RNA, 21 nt, synthetic construct
  source 1..21: mol_type = other RNA
gtaaaggtgagattctggggg

SEQ ID NO: 7518 - RNA, 21 nt, synthetic construct
  source 1..21: mol_type = other RNA
gtagaacaaaaacaagacctg

SEQ ID NO: 7519 - RNA, 21 nt, synthetic construct
  source 1..21: mol_type = other RNA
gtcagagcccacaggagatgt

SEQ ID NO: 7520 - RNA, 21 nt, synthetic construct
  source 1..21: mol_type = other RNA
gtcgctccctggggtagaaca

SEQ ID NO: 7521 - RNA, 21 nt, synthetic construct
  source 1..21: mol_type = other RNA
gtctcacagcttgtaaaggtg

SEQ ID NO: 7522 - RNA, 21 nt, synthetic construct
  source 1..21: mol_type = other RNA
gtctgagtctcacagcttgta

SEQ ID NO: 7523 - RNA, 21 nt, synthetic construct
  source 1..21: mol_type = other RNA
gtcttgtttttgttctacccc

SEQ ID NO: 7524 - RNA, 21 nt, synthetic construct
  source 1..21: mol_type = other RNA
gtgagactcagacccctgggc

SEQ ID NO: 7525 - RNA, 21 nt, synthetic construct
  source 1..21: mol_type = other RNA
gtgagattctgggggtctgaa

SEQ ID NO: 7526 - RNA, 21 nt, synthetic construct
  source 1..21: mol_type = other RNA
gtgcccaggggtctgagtctc

SEQ ID NO: 7527 - RNA, 21 nt, synthetic construct
  source 1..21: mol_type = other RNA
gtgggctctgaccaggtcttg

SEQ ID NO: 7528 - RNA, 21 nt, synthetic construct
  source 1..21: mol_type = other RNA
gttctaccccagggagcgaca

SEQ ID NO: 7529 - RNA, 21 nt, synthetic construct
  source 1..21: mol_type = other RNA
gtttttgttctaccccaggga

SEQ ID NO: 7530 - RNA, 21 nt, synthetic construct
  source 1..21: mol_type = other RNA
taaaggtgagattctgggggt

SEQ ID NO: 7531 - RNA, 21 nt, synthetic construct
  source 1..21: mol_type = other RNA
taattcctcctgcaccacatc

SEQ ID NO: 7532 - RNA, 21 nt, synthetic construct
  source 1..21: mol_type = other RNA
tacaagctgtgagactcagac

SEQ ID NO: 7533 - RNA, 21 nt, synthetic construct
  source 1..21: mol_type = other RNA
taccccagggagcgacagtgc

SEQ ID NO: 7534 - RNA, 21 nt, synthetic construct
  source 1..21: mol_type = other RNA
tagaacaaaaacaagacctgg

SEQ ID NO: 7535 - RNA, 21 nt, synthetic construct
  source 1..21: mol_type = other RNA
tataattcctcctgcaccaca

SEQ ID NO: 7536 - RNA, 21 nt, synthetic construct
  source 1..21: mol_type = other RNA
tcacagcttgtaaaggtgaga

SEQ ID NO: 7537 - RNA, 21 nt, synthetic construct
  source 1..21: mol_type = other RNA
tcacctttacaagctgtgaga

SEQ ID NO: 7538 - RNA, 21 nt, synthetic construct
  source 1..21: mol_type = other RNA
tcagacccccagaatctcacc

SEQ ID NO: 7539 - RNA, 21 nt, synthetic construct
  source 1..21: mol_type = other RNA
tcagacccctgggcactgtcg

SEQ ID NO: 7540 - RNA, 21 nt, synthetic construct
  source 1..21: mol_type = other RNA
tcagagcccacaggagatgtg

SEQ ID NO: 7541 - RNA, 21 nt, synthetic construct
  source 1..21: mol_type = other RNA
tccacccacttcagaccccca

SEQ ID NO: 7542 - RNA, 21 nt, synthetic construct
  source 1..21: mol_type = other RNA
tccctggggtagaacaaaaac

SEQ ID NO: 7543 - RNA, 21 nt, synthetic construct
  source 1..21: mol_type = other RNA
tcctcctgcaccacatctcct

SEQ ID NO: 7544 - RNA, 21 nt, synthetic construct
  source 1..21: mol_type = other RNA
tcctgcaccacatctcctgtg

SEQ ID NO: 7545 - RNA, 21 nt, synthetic construct
  source 1..21: mol_type = other RNA
tcctgtgggctctgaccaggt

SEQ ID NO: 7546 - RNA, 21 nt, synthetic construct
  source 1..21: mol_type = other RNA
tcgctccctggggtagaacaa

SEQ ID NO: 7547 - RNA, 21 nt, synthetic construct
  source 1..21: mol_type = other RNA
tctaccccagggagcgacagt

SEQ ID NO: 7548 - RNA, 21 nt, synthetic construct
  source 1..21: mol_type = other RNA
tctcacagcttgtaaaggtga

SEQ ID NO: 7549 - RNA, 21 nt, synthetic construct
  source 1..21: mol_type = other RNA
tctcacctttacaagctgtga

SEQ ID NO: 7550 - RNA, 21 nt, synthetic construct
  source 1..21: mol_type = other RNA
tctcctgtgggctctgaccag

SEQ ID NO: 7551 - RNA, 21 nt, synthetic construct
  source 1..21: mol_type = other RNA
tctgaccaggtcttgtttttg

SEQ ID NO: 7552 - RNA, 21 nt, synthetic construct
  source 1..21: mol_type = other RNA
tctgagtctcacagcttgtaa

SEQ ID NO: 7553 - RNA, 21 nt, synthetic construct
  source 1..21: mol_type = other RNA
tctgggggtctgaagtgggtg

SEQ ID NO: 7554 - RNA, 21 nt, synthetic construct
  source 1..21: mol_type = other RNA
tcttgtttttgttctacccca

SEQ ID NO: 7555 - RNA, 21 nt, synthetic construct
  source 1..21: mol_type = other RNA
tgaccaggtcttgtttttgtt

SEQ ID NO: 7556 - RNA, 21 nt, synthetic construct
  source 1..21: mol_type = other RNA
tgagactcagacccctgggca

SEQ ID NO: 7557 - RNA, 21 nt, synthetic construct
  source 1..21: mol_type = other RNA
tgagattctgggggtctgaag

SEQ ID NO: 7558 - RNA, 21 nt, synthetic construct
  source 1..21: mol_type = other RNA
tgagtctcacagcttgtaaag

SEQ ID NO: 7559 - RNA, 21 nt, synthetic construct
  source 1..21: mol_type = other RNA
tgcaccacatctcctgtgggc

SEQ ID NO: 7560 - RNA, 21 nt, synthetic construct
  source 1..21: mol_type = other RNA
tgcccaggggtctgagtctca

SEQ ID NO: 7561 - RNA, 21 nt, synthetic construct
  source 1..21: mol_type = other RNA
tgggcactgtcgctccctggg

SEQ ID NO: 7562 - RNA, 21 nt, synthetic construct
  source 1..21: mol_type = other RNA
tgggctctgaccaggtcttgt

SEQ ID NO: 7563 - RNA, 21 nt, synthetic construct
  source 1..21: mol_type = other RNA
tggggtagaacaaaaacaaga

SEQ ID NO: 7564 - RNA, 21 nt, synthetic construct
  source 1..21: mol_type = other RNA
tggtcagagcccacaggagat

SEQ ID NO: 7565 - RNA, 21 nt, synthetic construct
  source 1..21: mol_type = other RNA
tgtaaaggtgagattctgggg

SEQ ID NO: 7566 - RNA, 21 nt, synthetic construct
  source 1..21: mol_type = other RNA
tgtcgctccctggggtagaac

SEQ ID NO: 7567 - RNA, 21 nt, synthetic construct
  source 1..21: mol_type = other RNA
tgtgagactcagacccctggg

SEQ ID NO: 7568 - RNA, 21 nt, synthetic construct
  source 1..21: mol_type = other RNA
tgtgggctctgaccaggtctt

SEQ ID NO: 7569 - RNA, 21 nt, synthetic construct
  source 1..21: mol_type = other RNA
tgttctaccccagggagcgac

SEQ ID NO: 7570 - RNA, 21 nt, synthetic construct
  source 1..21: mol_type = other RNA
tgtttttgttctaccccaggg

SEQ ID NO: 7571 - RNA, 21 nt, synthetic construct
  source 1..21: mol_type = other RNA
ttacaagctgtgagactcaga

SEQ ID NO: 7572 - RNA, 21 nt, synthetic construct
  source 1..21: mol_type = other RNA
ttcagacccccagaatctcac

SEQ ID NO: 7573 - RNA, 21 nt, synthetic construct
  source 1..21: mol_type = other RNA
ttcctcctgcaccacatctcc

SEQ ID NO: 7574 - RNA, 21 nt, synthetic construct
  source 1..21: mol_type = other RNA
ttctaccccagggagcgacag

SEQ ID NO: 7575 - RNA, 21 nt, synthetic construct
  source 1..21: mol_type = other RNA
ttctgggggtctgaagtgggt

SEQ ID NO: 7576 - RNA, 21 nt, synthetic construct
  source 1..21: mol_type = other RNA
ttgtaaaggtgagattctggg

SEQ ID NO: 7577 - RNA, 21 nt, synthetic construct
  source 1..21: mol_type = other RNA
ttgttctaccccagggagcga

SEQ ID NO: 7578 - RNA, 21 nt, synthetic construct
  source 1..21: mol_type = other RNA
ttgtttttgttctaccccagg

SEQ ID NO: 7579 - RNA, 21 nt, synthetic construct
  source 1..21: mol_type = other RNA
tttacaagctgtgagactcag

SEQ ID NO: 7580 - RNA, 21 nt, synthetic construct
  source 1..21: mol_type = other RNA
tttgttctaccccagggagcg

SEQ ID NO: 7581 - RNA, 21 nt, synthetic construct
  source 1..21: mol_type = other RNA
ttttgttctaccccagggagc

SEQ ID NO: 7582 - RNA, 21 nt, synthetic construct
  source 1..21: mol_type = other RNA
tttttgttctaccccagggag

SEQ ID NO: 7583 - RNA, 22 nt, synthetic construct
  source 1..22: mol_type = other RNA
aaaaacaagacctggtcagagc

SEQ ID NO: 7584 - RNA, 22 nt, synthetic construct
  source 1..22: mol_type = other RNA
aaaacaagacctggtcagagcc

SEQ ID NO: 7585 - RNA, 22 nt, synthetic construct
  source 1..22: mol_type = other RNA
aaacaagacctggtcagagccc

SEQ ID NO: 7586 - RNA, 22 nt, synthetic construct
  source 1..22: mol_type = other RNA
aaaggtgagattctgggggtct

SEQ ID NO: 7587 - RNA, 22 nt, synthetic construct
  source 1..22: mol_type = other RNA
aacaaaaacaagacctggtcag

SEQ ID NO: 7588 - RNA, 22 nt, synthetic construct
  source 1..22: mol_type = other RNA
aacaagacctggtcagagccca

SEQ ID NO: 7589 - RNA, 22 nt, synthetic construct
  source 1..22: mol_type = other RNA
aagacctggtcagagcccacag

SEQ ID NO: 7590 - RNA, 22 nt, synthetic construct
  source 1..22: mol_type = other RNA
aagctgtgagactcagacccct

SEQ ID NO: 7591 - RNA, 22 nt, synthetic construct
  source 1..22: mol_type = other RNA
aaggtgagattctgggggtctg

SEQ ID NO: 7592 - RNA, 22 nt, synthetic construct
  source 1..22: mol_type = other RNA
aatctcacctttacaagctgtg

SEQ ID NO: 7593 - RNA, 22 nt, synthetic construct
  source 1..22: mol_type = other RNA
aattcctcctgcaccacatctc

SEQ ID NO: 7594 - RNA, 22 nt, synthetic construct
  source 1..22: mol_type = other RNA
acaaaaacaagacctggtcaga

SEQ ID NO: 7595 - RNA, 22 nt, synthetic construct
  source 1..22: mol_type = other RNA
acaagacctggtcagagcccac

SEQ ID NO: 7596 - RNA, 22 nt, synthetic construct
  source 1..22: mol_type = other RNA
acaagctgtgagactcagaccc

SEQ ID NO: 7597 - RNA, 22 nt, synthetic construct
  source 1..22: mol_type = other RNA
acagcttgtaaaggtgagattc

SEQ ID NO: 7598 - RNA, 22 nt, synthetic construct
  source 1..22: mol_type = other RNA
acaggagatgtggtgcaggagg

SEQ ID NO: 7599 - RNA, 22 nt, synthetic construct
  source 1..22: mol_type = other RNA
acagtgcccaggggtctgagtc

SEQ ID NO: 7600 - RNA, 22 nt, synthetic construct
  source 1..22: mol_type = other RNA
acatctcctgtgggctctgacc

SEQ ID NO: 7601 - RNA, 22 nt, synthetic construct
  source 1..22: mol_type = other RNA
accacatctcctgtgggctctg

SEQ ID NO: 7602 - RNA, 22 nt, synthetic construct
  source 1..22: mol_type = other RNA
accaggtcttgtttttgttcta

SEQ ID NO: 7603 - RNA, 22 nt, synthetic construct
  source 1..22: mol_type = other RNA
acccacttcagacccccagaat

SEQ ID NO: 7604 - RNA, 22 nt, synthetic construct
  source 1..22: mol_type = other RNA
accccagggagcgacagtgccc

SEQ ID NO: 7605 - RNA, 22 nt, synthetic construct
  source 1..22: mol_type = other RNA
acccccagaatctcacctttac

SEQ ID NO: 7606 - RNA, 22 nt, synthetic construct
  source 1..22: mol_type = other RNA
acccctgggcactgtcgctccc

SEQ ID NO: 7607 - RNA, 22 nt, synthetic construct
  source 1..22: mol_type = other RNA
accctataattcctcctgcacc

SEQ ID NO: 7608 - RNA, 22 nt, synthetic construct
  source 1..22: mol_type = other RNA
accctccacccacttcagaccc

SEQ ID NO: 7609 - RNA, 22 nt, synthetic construct
  source 1..22: mol_type = other RNA
acctggtcagagcccacaggag

SEQ ID NO: 7610 - RNA, 22 nt, synthetic construct
  source 1..22: mol_type = other RNA
acctttacaagctgtgagactc

SEQ ID NO: 7611 - RNA, 22 nt, synthetic construct
  source 1..22: mol_type = other RNA
actcagacccctgggcactgtc

SEQ ID NO: 7612 - RNA, 22 nt, synthetic construct
  source 1..22: mol_type = other RNA
actgtcgctccctggggtagaa

SEQ ID NO: 7613 - RNA, 22 nt, synthetic construct
  source 1..22: mol_type = other RNA
acttcagacccccagaatctca

SEQ ID NO: 7614 - RNA, 22 nt, synthetic construct
  source 1..22: mol_type = other RNA
agaacaaaaacaagacctggtc

SEQ ID NO: 7615 - RNA, 22 nt, synthetic construct
  source 1..22: mol_type = other RNA
agaatctcacctttacaagctg

SEQ ID NO: 7616 - RNA, 22 nt, synthetic construct
  source 1..22: mol_type = other RNA
agacccccagaatctcaccttt

SEQ ID NO: 7617 - RNA, 22 nt, synthetic construct
  source 1..22: mol_type = other RNA
agacccctgggcactgtcgctc

SEQ ID NO: 7618 - RNA, 22 nt, synthetic construct
  source 1..22: mol_type = other RNA
agacctggtcagagcccacagg

SEQ ID NO: 7619 - RNA, 22 nt, synthetic construct
  source 1..22: mol_type = other RNA
agactcagacccctgggcactg

SEQ ID NO: 7620 - RNA, 22 nt, synthetic construct
  source 1..22: mol_type = other RNA
agagcccacaggagatgtggtg

SEQ ID NO: 7621 - RNA, 22 nt, synthetic construct
  source 1..22: mol_type = other RNA
agattctgggggtctgaagtgg

SEQ ID NO: 7622 - RNA, 22 nt, synthetic construct
  source 1..22: mol_type = other RNA
agcccacaggagatgtggtgca

SEQ ID NO: 7623 - RNA, 22 nt, synthetic construct
  source 1..22: mol_type = other RNA
agcgacagtgcccaggggtctg

SEQ ID NO: 7624 - RNA, 22 nt, synthetic construct
  source 1..22: mol_type = other RNA
agctgtgagactcagacccctg

SEQ ID NO: 7625 - RNA, 22 nt, synthetic construct
  source 1..22: mol_type = other RNA
agcttgtaaaggtgagattctg

SEQ ID NO: 7626 - RNA, 22 nt, synthetic construct
  source 1..22: mol_type = other RNA
aggagatgtggtgcaggaggaa

SEQ ID NO: 7627 - RNA, 22 nt, synthetic construct
  source 1..22: mol_type = other RNA
agggagcgacagtgcccagggg

SEQ ID NO: 7628 - RNA, 22 nt, synthetic construct
  source 1..22: mol_type = other RNA
aggggtctgagtctcacagctt

SEQ ID NO: 7629 - RNA, 22 nt, synthetic construct
  source 1..22: mol_type = other RNA
aggtcttgtttttgttctaccc

SEQ ID NO: 7630 - RNA, 22 nt, synthetic construct
  source 1..22: mol_type = other RNA
aggtgagattctgggggtctga

SEQ ID NO: 7631 - RNA, 22 nt, synthetic construct
  source 1..22: mol_type = other RNA
agtctcacagcttgtaaaggtg

SEQ ID NO: 7632 - RNA, 22 nt, synthetic construct
  source 1..22: mol_type = other RNA
agtgcccaggggtctgagtctc

SEQ ID NO: 7633 - RNA, 22 nt, synthetic construct
  source 1..22: mol_type = other RNA
ataattcctcctgcaccacatc

SEQ ID NO: 7634 - RNA, 22 nt, synthetic construct
  source 1..22: mol_type = other RNA
atctcacctttacaagctgtga

SEQ ID NO: 7635 - RNA, 22 nt, synthetic construct
  source 1..22: mol_type = other RNA
atctcctgtgggctctgaccag

SEQ ID NO: 7636 - RNA, 22 nt, synthetic construct
  source 1..22: mol_type = other RNA
attcctcctgcaccacatctcc

SEQ ID NO: 7637 - RNA, 22 nt, synthetic construct
  source 1..22: mol_type = other RNA
attctgggggtctgaagtgggt

SEQ ID NO: 7638 - RNA, 22 nt, synthetic construct
  source 1..22: mol_type = other RNA
caaaaacaagacctggtcagag

SEQ ID NO: 7639 - RNA, 22 nt, synthetic construct
  source 1..22: mol_type = other RNA
caagacctggtcagagcccaca

SEQ ID NO: 7640 - RNA, 22 nt, synthetic construct
  source 1..22: mol_type = other RNA
caagctgtgagactcagacccc

SEQ ID NO: 7641 - RNA, 22 nt, synthetic construct
  source 1..22: mol_type = other RNA
cacagcttgtaaaggtgagatt

SEQ ID NO: 7642 - RNA, 22 nt, synthetic construct
  source 1..22: mol_type = other RNA
cacaggagatgtggtgcaggag

SEQ ID NO: 7643 - RNA, 22 nt, synthetic construct
  source 1..22: mol_type = other RNA
cacatctcctgtgggctctgac

SEQ ID NO: 7644 - RNA, 22 nt, synthetic construct
  source 1..22: mol_type = other RNA
caccacatctcctgtgggctct

SEQ ID NO: 7645 - RNA, 22 nt, synthetic construct
  source 1..22: mol_type = other RNA
cacccacttcagacccccagaa

SEQ ID NO: 7646 - RNA, 22 nt, synthetic construct
  source 1..22: mol_type = other RNA
caccctataattcctcctgcac

SEQ ID NO: 7647 - RNA, 22 nt, synthetic construct
  source 1..22: mol_type = other RNA
caccctccacccacttcagacc

SEQ ID NO: 7648 - RNA, 22 nt, synthetic construct
  source 1..22: mol_type = other RNA
cacctttacaagctgtgagact

SEQ ID NO: 7649 - RNA, 22 nt, synthetic construct
  source 1..22: mol_type = other RNA
cactgtcgctccctggggtaga

SEQ ID NO: 7650 - RNA, 22 nt, synthetic construct
  source 1..22: mol_type = other RNA
cacttcagacccccagaatctc

SEQ ID NO: 7651 - RNA, 22 nt, synthetic construct
  source 1..22: mol_type = other RNA
cagaatctcacctttacaagct

SEQ ID NO: 7652 - RNA, 22 nt, synthetic construct
  source 1..22: mol_type = other RNA
cagacccccagaatctcacctt

SEQ ID NO: 7653 - RNA, 22 nt, synthetic construct
  source 1..22: mol_type = other RNA
cagacccctgggcactgtcgct

SEQ ID NO: 7654 - RNA, 22 nt, synthetic construct
  source 1..22: mol_type = other RNA
cagagcccacaggagatgtggt

SEQ ID NO: 7655 - RNA, 22 nt, synthetic construct
  source 1..22: mol_type = other RNA
cagcttgtaaaggtgagattct

SEQ ID NO: 7656 - RNA, 22 nt, synthetic construct
  source 1..22: mol_type = other RNA
caggagatgtggtgcaggagga

SEQ ID NO: 7657 - RNA, 22 nt, synthetic construct
  source 1..22: mol_type = other RNA
cagggagcgacagtgcccaggg

SEQ ID NO: 7658 - RNA, 22 nt, synthetic construct
  source 1..22: mol_type = other RNA
caggggtctgagtctcacagct

SEQ ID NO: 7659 - RNA, 22 nt, synthetic construct
  source 1..22: mol_type = other RNA
caggtcttgtttttgttctacc

SEQ ID NO: 7660 - RNA, 22 nt, synthetic construct
  source 1..22: mol_type = other RNA
cagtgcccaggggtctgagtct

SEQ ID NO: 7661 - RNA, 22 nt, synthetic construct
  source 1..22: mol_type = other RNA
catctcctgtgggctctgacca

SEQ ID NO: 7662 - RNA, 22 nt, synthetic construct
  source 1..22: mol_type = other RNA
ccacaggagatgtggtgcagga

SEQ ID NO: 7663 - RNA, 22 nt, synthetic construct
  source 1..22: mol_type = other RNA
ccacatctcctgtgggctctga

SEQ ID NO: 7664 - RNA, 22 nt, synthetic construct
  source 1..22: mol_type = other RNA
ccacccacttcagacccccaga

SEQ ID NO: 7665 - RNA, 22 nt, synthetic construct
  source 1..22: mol_type = other RNA
ccaccctccacccacttcagac

SEQ ID NO: 7666 - RNA, 22 nt, synthetic construct
  source 1..22: mol_type = other RNA
ccacttcagacccccagaatct

SEQ ID NO: 7667 - RNA, 22 nt, synthetic construct
  source 1..22: mol_type = other RNA
ccagaatctcacctttacaagc

SEQ ID NO: 7668 - RNA, 22 nt, synthetic construct
  source 1..22: mol_type = other RNA
ccagggagcgacagtgcccagg

SEQ ID NO: 7669 - RNA, 22 nt, synthetic construct
  source 1..22: mol_type = other RNA
ccaggggtctgagtctcacagc

SEQ ID NO: 7670 - RNA, 22 nt, synthetic construct
  source 1..22: mol_type = other RNA
ccaggtcttgtttttgttctac

SEQ ID NO: 7671 - RNA, 22 nt, synthetic construct
  source 1..22: mol_type = other RNA
cccacaggagatgtggtgcagg

SEQ ID NO: 7672 - RNA, 22 nt, synthetic construct
  source 1..22: mol_type = other RNA
cccacttcagacccccagaatc

SEQ ID NO: 7673 - RNA, 22 nt, synthetic construct
  source 1..22: mol_type = other RNA
cccagaatctcacctttacaag

SEQ ID NO: 7674 - RNA, 22 nt, synthetic construct
  source 1..22: mol_type = other RNA
cccagggagcgacagtgcccag

SEQ ID NO: 7675 - RNA, 22 nt, synthetic construct
  source 1..22: mol_type = other RNA
cccaggggtctgagtctcacag

SEQ ID NO: 7676 - RNA, 22 nt, synthetic construct
  source 1..22: mol_type = other RNA
ccccagaatctcacctttacaa

SEQ ID NO: 7677 - RNA, 22 nt, synthetic construct
  source 1..22: mol_type = other RNA
ccccagggagcgacagtgccca

SEQ ID NO: 7678 - RNA, 22 nt, synthetic construct
  source 1..22: mol_type = other RNA
cccccagaatctcacctttaca

SEQ ID NO: 7679 - RNA, 22 nt, synthetic construct
  source 1..22: mol_type = other RNA
cccctgggcactgtcgctccct

SEQ ID NO: 7680 - RNA, 22 nt, synthetic construct
  source 1..22: mol_type = other RNA
ccctataattcctcctgcacca

SEQ ID NO: 7681 - RNA, 22 nt, synthetic construct
  source 1..22: mol_type = other RNA
ccctccacccacttcagacccc

SEQ ID NO: 7682 - RNA, 22 nt, synthetic construct
  source 1..22: mol_type = other RNA
ccctgggcactgtcgctccctg

SEQ ID NO: 7683 - RNA, 22 nt, synthetic construct
  source 1..22: mol_type = other RNA
ccctggggtagaacaaaaacaa

SEQ ID NO: 7684 - RNA, 22 nt, synthetic construct
  source 1..22: mol_type = other RNA
cctataattcctcctgcaccac

SEQ ID NO: 7685 - RNA, 22 nt, synthetic construct
  source 1..22: mol_type = other RNA
cctccacccacttcagaccccc

SEQ ID NO: 7686 - RNA, 22 nt, synthetic construct
  source 1..22: mol_type = other RNA
cctcctgcaccacatctcctgt

SEQ ID NO: 7687 - RNA, 22 nt, synthetic construct
  source 1..22: mol_type = other RNA
cctgcaccacatctcctgtggg

SEQ ID NO: 7688 - RNA, 22 nt, synthetic construct
  source 1..22: mol_type = other RNA
cctgggcactgtcgctccctgg

SEQ ID NO: 7689 - RNA, 22 nt, synthetic construct
  source 1..22: mol_type = other RNA
cctggggtagaacaaaaacaag

SEQ ID NO: 7690 - RNA, 22 nt, synthetic construct
  source 1..22: mol_type = other RNA
cctggtcagagcccacaggaga

SEQ ID NO: 7691 - RNA, 22 nt, synthetic construct
  source 1..22: mol_type = other RNA
cctgtgggctctgaccaggtct

SEQ ID NO: 7692 - RNA, 22 nt, synthetic construct
  source 1..22: mol_type = other RNA
cctttacaagctgtgagactca

SEQ ID NO: 7693 - RNA, 22 nt, synthetic construct
  source 1..22: mol_type = other RNA
cgacagtgcccaggggtctgag

SEQ ID NO: 7694 - RNA, 22 nt, synthetic construct
  source 1..22: mol_type = other RNA
cgctccctggggtagaacaaaa

SEQ ID NO: 7695 - RNA, 22 nt, synthetic construct
  source 1..22: mol_type = other RNA
ctaccccagggagcgacagtgc

SEQ ID NO: 7696 - RNA, 22 nt, synthetic construct
  source 1..22: mol_type = other RNA
ctataattcctcctgcaccaca

SEQ ID NO: 7697 - RNA, 22 nt, synthetic construct
  source 1..22: mol_type = other RNA
ctcacagcttgtaaaggtgaga

SEQ ID NO: 7698 - RNA, 22 nt, synthetic construct
  source 1..22: mol_type = other RNA
ctcacctttacaagctgtgaga

SEQ ID NO: 7699 - RNA, 22 nt, synthetic construct
  source 1..22: mol_type = other RNA
ctcagacccctgggcactgtcg

SEQ ID NO: 7700 - RNA, 22 nt, synthetic construct
  source 1..22: mol_type = other RNA
ctccacccacttcagaccccca

SEQ ID NO: 7701 - RNA, 22 nt, synthetic construct
  source 1..22: mol_type = other RNA
ctccctggggtagaacaaaaac

SEQ ID NO: 7702 - RNA, 22 nt, synthetic construct
  source 1..22: mol_type = other RNA
ctcctgcaccacatctcctgtg

SEQ ID NO: 7703 - RNA, 22 nt, synthetic construct
  source 1..22: mol_type = other RNA
ctcctgtgggctctgaccaggt

SEQ ID NO: 7704 - RNA, 22 nt, synthetic construct
  source 1..22: mol_type = other RNA
ctctgaccaggtcttgtttttg

SEQ ID NO: 7705 - RNA, 22 nt, synthetic construct
  source 1..22: mol_type = other RNA
ctgaccaggtcttgtttttgtt

SEQ ID NO: 7706 - RNA, 22 nt, synthetic construct
  source 1..22: mol_type = other RNA
ctgagtctcacagcttgtaaag

SEQ ID NO: 7707 - RNA, 22 nt, synthetic construct
  source 1..22: mol_type = other RNA
ctgcaccacatctcctgtgggc

SEQ ID NO: 7708 - RNA, 22 nt, synthetic construct
  source 1..22: mol_type = other RNA
ctgggcactgtcgctccctggg

SEQ ID NO: 7709 - RNA, 22 nt, synthetic construct
  source 1..22: mol_type = other RNA
ctggggtagaacaaaaacaaga

SEQ ID NO: 7710 - RNA, 22 nt, synthetic construct
  source 1..22: mol_type = other RNA
ctggtcagagcccacaggagat

SEQ ID NO: 7711 - RNA, 22 nt, synthetic construct
  source 1..22: mol_type = other RNA
ctgtcgctccctggggtagaac

SEQ ID NO: 7712 - RNA, 22 nt, synthetic construct
  source 1..22: mol_type = other RNA
ctgtgagactcagacccctggg

SEQ ID NO: 7713 - RNA, 22 nt, synthetic construct
  source 1..22: mol_type = other RNA
ctgtgggctctgaccaggtctt

SEQ ID NO: 7714 - RNA, 22 nt, synthetic construct
  source 1..22: mol_type = other RNA
cttcagacccccagaatctcac

SEQ ID NO: 7715 - RNA, 22 nt, synthetic construct
  source 1..22: mol_type = other RNA
cttgtaaaggtgagattctggg

SEQ ID NO: 7716 - RNA, 22 nt, synthetic construct
  source 1..22: mol_type = other RNA
cttgtttttgttctaccccagg

SEQ ID NO: 7717 - RNA, 22 nt, synthetic construct
  source 1..22: mol_type = other RNA
ctttacaagctgtgagactcag

SEQ ID NO: 7718 - RNA, 22 nt, synthetic construct
  source 1..22: mol_type = other RNA
gaacaaaaacaagacctggtca

SEQ ID NO: 7719 - RNA, 22 nt, synthetic construct
  source 1..22: mol_type = other RNA
gaatctcacctttacaagctgt

SEQ ID NO: 7720 - RNA, 22 nt, synthetic construct
  source 1..22: mol_type = other RNA
gacagtgcccaggggtctgagt

SEQ ID NO: 7721 - RNA, 22 nt, synthetic construct
  source 1..22: mol_type = other RNA
gaccaggtcttgtttttgttct

SEQ ID NO: 7722 - RNA, 22 nt, synthetic construct
  source 1..22: mol_type = other RNA
gacccccagaatctcaccttta

SEQ ID NO: 7723 - RNA, 22 nt, synthetic construct
  source 1..22: mol_type = other RNA
gacccctgggcactgtcgctcc

SEQ ID NO: 7724 - RNA, 22 nt, synthetic construct
  source 1..22: mol_type = other RNA
gacctggtcagagcccacagga

SEQ ID NO: 7725 - RNA, 22 nt, synthetic construct
  source 1..22: mol_type = other RNA
gactcagacccctgggcactgt

SEQ ID NO: 7726 - RNA, 22 nt, synthetic construct
  source 1..22: mol_type = other RNA
gagactcagacccctgggcact

SEQ ID NO: 7727 - RNA, 22 nt, synthetic construct
  source 1..22: mol_type = other RNA
gagatgtggtgcaggaggaatt

SEQ ID NO: 7728 - RNA, 22 nt, synthetic construct
  source 1..22: mol_type = other RNA
gagattctgggggtctgaagtg

SEQ ID NO: 7729 - RNA, 22 nt, synthetic construct
  source 1..22: mol_type = other RNA
gagcccacaggagatgtggtgc

SEQ ID NO: 7730 - RNA, 22 nt, synthetic construct
  source 1..22: mol_type = other RNA
gagcgacagtgcccaggggtct

SEQ ID NO: 7731 - RNA, 22 nt, synthetic construct
  source 1..22: mol_type = other RNA
gagtctcacagcttgtaaaggt

SEQ ID NO: 7732 - RNA, 22 nt, synthetic construct
  source 1..22: mol_type = other RNA
gattctgggggtctgaagtggg

SEQ ID NO: 7733 - RNA, 22 nt, synthetic construct
  source 1..22: mol_type = other RNA
gcaccacatctcctgtgggctc

SEQ ID NO: 7734 - RNA, 22 nt, synthetic construct
  source 1..22: mol_type = other RNA
gcactgtcgctccctggggtag

SEQ ID NO: 7735 - RNA, 22 nt, synthetic construct
  source 1..22: mol_type = other RNA
gcccacaggagatgtggtgcag

SEQ ID NO: 7736 - RNA, 22 nt, synthetic construct
  source 1..22: mol_type = other RNA
gcccaggggtctgagtctcaca

SEQ ID NO: 7737 - RNA, 22 nt, synthetic construct
  source 1..22: mol_type = other RNA
gcgacagtgcccaggggtctga

SEQ ID NO: 7738 - RNA, 22 nt, synthetic construct
  source 1..22: mol_type = other RNA
gctccctggggtagaacaaaaa

SEQ ID NO: 7739 - RNA, 22 nt, synthetic construct
  source 1..22: mol_type = other RNA
gctctgaccaggtcttgttttt

SEQ ID NO: 7740 - RNA, 22 nt, synthetic construct
  source 1..22: mol_type = other RNA
gctgtgagactcagacccctgg

SEQ ID NO: 7741 - RNA, 22 nt, synthetic construct
  source 1..22: mol_type = other RNA
gcttgtaaaggtgagattctgg

SEQ ID NO: 7742 - RNA, 22 nt, synthetic construct
  source 1..22: mol_type = other RNA
ggagatgtggtgcaggaggaat

SEQ ID NO: 7743 - RNA, 22 nt, synthetic construct
  source 1..22: mol_type = other RNA
ggagcgacagtgcccaggggtc

SEQ ID NO: 7744 - RNA, 22 nt, synthetic construct
  source 1..22: mol_type = other RNA
ggcactgtcgctccctggggta

SEQ ID NO: 7745 - RNA, 22 nt, synthetic construct
  source 1..22: mol_type = other RNA
ggctctgaccaggtcttgtttt

SEQ ID NO: 7746 - RNA, 22 nt, synthetic construct
  source 1..22: mol_type = other RNA
gggagcgacagtgcccaggggt

SEQ ID NO: 7747 - RNA, 22 nt, synthetic construct
  source 1..22: mol_type = other RNA
gggcactgtcgctccctggggt

SEQ ID NO: 7748 - RNA, 22 nt, synthetic construct
  source 1..22: mol_type = other RNA
gggctctgaccaggtcttgttt

SEQ ID NO: 7749 - RNA, 22 nt, synthetic construct
  source 1..22: mol_type = other RNA
ggggtagaacaaaaacaagacc

SEQ ID NO: 7750 - RNA, 22 nt, synthetic construct
  source 1..22: mol_type = other RNA
ggggtctgagtctcacagcttg

SEQ ID NO: 7751 - RNA, 22 nt, synthetic construct
  source 1..22: mol_type = other RNA
gggtagaacaaaaacaagacct

SEQ ID NO: 7752 - RNA, 22 nt, synthetic construct
  source 1..22: mol_type = other RNA
gggtctgagtctcacagcttgt

SEQ ID NO: 7753 - RNA, 22 nt, synthetic construct
  source 1..22: mol_type = other RNA
ggtagaacaaaaacaagacctg

SEQ ID NO: 7754 - RNA, 22 nt, synthetic construct
  source 1..22: mol_type = other RNA
ggtcagagcccacaggagatgt

SEQ ID NO: 7755 - RNA, 22 nt, synthetic construct
  source 1..22: mol_type = other RNA
ggtctgagtctcacagcttgta

SEQ ID NO: 7756 - RNA, 22 nt, synthetic construct
  source 1..22: mol_type = other RNA
ggtcttgtttttgttctacccc

SEQ ID NO: 7757 - RNA, 22 nt, synthetic construct
  source 1..22: mol_type = other RNA
ggtgagattctgggggtctgaa

SEQ ID NO: 7758 - RNA, 22 nt, synthetic construct
  source 1..22: mol_type = other RNA
gtaaaggtgagattctgggggt

SEQ ID NO: 7759 - RNA, 22 nt, synthetic construct
  source 1..22: mol_type = other RNA
gtagaacaaaaacaagacctgg

SEQ ID NO: 7760 - RNA, 22 nt, synthetic construct
  source 1..22: mol_type = other RNA
gtcagagcccacaggagatgtg

SEQ ID NO: 7761 - RNA, 22 nt, synthetic construct
  source 1..22: mol_type = other RNA
gtcgctccctggggtagaacaa

SEQ ID NO: 7762 - RNA, 22 nt, synthetic construct
  source 1..22: mol_type = other RNA
gtctcacagcttgtaaaggtga

SEQ ID NO: 7763 - RNA, 22 nt, synthetic construct
  source 1..22: mol_type = other RNA
gtctgagtctcacagcttgtaa

SEQ ID NO: 7764 - RNA, 22 nt, synthetic construct
  source 1..22: mol_type = other RNA
gtcttgtttttgttctacccca

SEQ ID NO: 7765 - RNA, 22 nt, synthetic construct
  source 1..22: mol_type = other RNA
gtgagactcagacccctgggca

SEQ ID NO: 7766 - RNA, 22 nt, synthetic construct
  source 1..22: mol_type = other RNA
gtgagattctgggggtctgaag

SEQ ID NO: 7767 - RNA, 22 nt, synthetic construct
  source 1..22: mol_type = other RNA
gtgcccaggggtctgagtctca

SEQ ID NO: 7768 - RNA, 22 nt, synthetic construct
  source 1..22: mol_type = other RNA
gtgggctctgaccaggtcttgt

SEQ ID NO: 7769 - RNA, 22 nt, synthetic construct
  source 1..22: mol_type = other RNA
gttctaccccagggagcgacag

SEQ ID NO: 7770 - RNA, 22 nt, synthetic construct
  source 1..22: mol_type = other RNA
gtttttgttctaccccagggag

SEQ ID NO: 7771 - RNA, 22 nt, synthetic construct
  source 1..22: mol_type = other RNA
taaaggtgagattctgggggtc

SEQ ID NO: 7772 - RNA, 22 nt, synthetic construct
  source 1..22: mol_type = other RNA
taattcctcctgcaccacatct

SEQ ID NO: 7773 - RNA, 22 nt, synthetic construct
  source 1..22: mol_type = other RNA
tacaagctgtgagactcagacc

SEQ ID NO: 7774 - RNA, 22 nt, synthetic construct
  source 1..22: mol_type = other RNA
taccccagggagcgacagtgcc

SEQ ID NO: 7775 - RNA, 22 nt, synthetic construct
  source 1..22: mol_type = other RNA
tagaacaaaaacaagacctggt

SEQ ID NO: 7776 - RNA, 22 nt, synthetic construct
  source 1..22: mol_type = other RNA
tataattcctcctgcaccacat

SEQ ID NO: 7777 - RNA, 22 nt, synthetic construct
  source 1..22: mol_type = other RNA
tcacagcttgtaaaggtgagat

SEQ ID NO: 7778 - RNA, 22 nt, synthetic construct
  source 1..22: mol_type = other RNA
tcacctttacaagctgtgagac

SEQ ID NO: 7779 - RNA, 22 nt, synthetic construct
  source 1..22: mol_type = other RNA
tcagacccccagaatctcacct

SEQ ID NO: 7780 - RNA, 22 nt, synthetic construct
  source 1..22: mol_type = other RNA
tcagacccctgggcactgtcgc

SEQ ID NO: 7781 - RNA, 22 nt, synthetic construct
  source 1..22: mol_type = other RNA
tcagagcccacaggagatgtgg

SEQ ID NO: 7782 - RNA, 22 nt, synthetic construct
  source 1..22: mol_type = other RNA
tccacccacttcagacccccag

SEQ ID NO: 7783 - RNA, 22 nt, synthetic construct
  source 1..22: mol_type = other RNA
tccctggggtagaacaaaaaca

SEQ ID NO: 7784 - RNA, 22 nt, synthetic construct
  source 1..22: mol_type = other RNA
tcctcctgcaccacatctcctg

SEQ ID NO: 7785 - RNA, 22 nt, synthetic construct
  source 1..22: mol_type = other RNA
tcctgcaccacatctcctgtgg

SEQ ID NO: 7786 - RNA, 22 nt, synthetic construct
  source 1..22: mol_type = other RNA
tcctgtgggctctgaccaggtc

SEQ ID NO: 7787 - RNA, 22 nt, synthetic construct
  source 1..22: mol_type = other RNA
tcgctccctggggtagaacaaa

SEQ ID NO: 7788 - RNA, 22 nt, synthetic construct
  source 1..22: mol_type = other RNA
tctaccccagggagcgacagtg

SEQ ID NO: 7789 - RNA, 22 nt, synthetic construct
  source 1..22: mol_type = other RNA
tctcacagcttgtaaaggtgag

SEQ ID NO: 7790 - RNA, 22 nt, synthetic construct
  source 1..22: mol_type = other RNA
tctcacctttacaagctgtgag

SEQ ID NO: 7791 - RNA, 22 nt, synthetic construct
  source 1..22: mol_type = other RNA
tctcctgtgggctctgaccagg

SEQ ID NO: 7792 - RNA, 22 nt, synthetic construct
  source 1..22: mol_type = other RNA
tctgaccaggtcttgtttttgt

SEQ ID NO: 7793 - RNA, 22 nt, synthetic construct
  source 1..22: mol_type = other RNA
tctgagtctcacagcttgtaaa

SEQ ID NO: 7794 - RNA, 22 nt, synthetic construct
  source 1..22: mol_type = other RNA
tcttgtttttgttctaccccag

SEQ ID NO: 7795 - RNA, 22 nt, synthetic construct
  source 1..22: mol_type = other RNA
tgaccaggtcttgtttttgttc

SEQ ID NO: 7796 - RNA, 22 nt, synthetic construct
  source 1..22: mol_type = other RNA
tgagactcagacccctgggcac

SEQ ID NO: 7797 - RNA, 22 nt, synthetic construct
  source 1..22: mol_type = other RNA
tgagattctgggggtctgaagt

SEQ ID NO: 7798 - RNA, 22 nt, synthetic construct
  source 1..22: mol_type = other RNA
tgagtctcacagcttgtaaagg

SEQ ID NO: 7799 - RNA, 22 nt, synthetic construct
  source 1..22: mol_type = other RNA
tgcaccacatctcctgtgggct

SEQ ID NO: 7800 - RNA, 22 nt, synthetic construct
  source 1..22: mol_type = other RNA
tgcccaggggtctgagtctcac

SEQ ID NO: 7801 - RNA, 22 nt, synthetic construct
  source 1..22: mol_type = other RNA
tgggcactgtcgctccctgggg

SEQ ID NO: 7802 - RNA, 22 nt, synthetic construct
  source 1..22: mol_type = other RNA
tgggctctgaccaggtcttgtt

SEQ ID NO: 7803 - RNA, 22 nt, synthetic construct
  source 1..22: mol_type = other RNA
tggggtagaacaaaaacaagac

SEQ ID NO: 7804 - RNA, 22 nt, synthetic construct
  source 1..22: mol_type = other RNA
tggtcagagcccacaggagatg

SEQ ID NO: 7805 - RNA, 22 nt, synthetic construct
  source 1..22: mol_type = other RNA
tgtaaaggtgagattctggggg

SEQ ID NO: 7806 - RNA, 22 nt, synthetic construct
  source 1..22: mol_type = other RNA
tgtcgctccctggggtagaaca

SEQ ID NO: 7807 - RNA, 22 nt, synthetic construct
  source 1..22: mol_type = other RNA
tgtgagactcagacccctgggc

SEQ ID NO: 7808 - RNA, 22 nt, synthetic construct
  source 1..22: mol_type = other RNA
tgtgggctctgaccaggtcttg

SEQ ID NO: 7809 - RNA, 22 nt, synthetic construct
  source 1..22: mol_type = other RNA
tgttctaccccagggagcgaca

SEQ ID NO: 7810 - RNA, 22 nt, synthetic construct
  source 1..22: mol_type = other RNA
tgtttttgttctaccccaggga

SEQ ID NO: 7811 - RNA, 22 nt, synthetic construct
  source 1..22: mol_type = other RNA
ttacaagctgtgagactcagac

SEQ ID NO: 7812 - RNA, 22 nt, synthetic construct
  source 1..22: mol_type = other RNA
ttcagacccccagaatctcacc

SEQ ID NO: 7813 - RNA, 22 nt, synthetic construct
  source 1..22: mol_type = other RNA
ttcctcctgcaccacatctcct

SEQ ID NO: 7814 - RNA, 22 nt, synthetic construct
  source 1..22: mol_type = other RNA
ttctaccccagggagcgacagt

SEQ ID NO: 7815 - RNA, 22 nt, synthetic construct
  source 1..22: mol_type = other RNA
ttctgggggtctgaagtgggtg

SEQ ID NO: 7816 - RNA, 22 nt, synthetic construct
  source 1..22: mol_type = other RNA
ttgtaaaggtgagattctgggg

SEQ ID NO: 7817 - RNA, 22 nt, synthetic construct
  source 1..22: mol_type = other RNA
ttgttctaccccagggagcgac

SEQ ID NO: 7818 - RNA, 22 nt, synthetic construct
  source 1..22: mol_type = other RNA
ttgtttttgttctaccccaggg

SEQ ID NO: 7819 - RNA, 22 nt, synthetic construct
  source 1..22: mol_type = other RNA
tttacaagctgtgagactcaga

SEQ ID NO: 7820 - RNA, 22 nt, synthetic construct
  source 1..22: mol_type = other RNA
tttgttctaccccagggagcga

SEQ ID NO: 7821 - RNA, 22 nt, synthetic construct
  source 1..22: mol_type = other RNA
ttttgttctaccccagggagcg

SEQ ID NO: 7822 - RNA, 22 nt, synthetic construct
  source 1..22: mol_type = other RNA
tttttgttctaccccagggagc

SEQ ID NO: 7823 - RNA, 22 nt, synthetic construct
  source 1..22: mol_type = other RNA
gcctgagacagctgccttgtgt

SEQ ID NO: 7824 - RNA, 22 nt, synthetic construct
  source 1..22: mol_type = other RNA
gagatgcacagctgccttgtgt

SEQ ID NO: 7825 - RNA, 22 nt, synthetic construct
  source 1..22: mol_type = other RNA
ggggtcatggtagacacagagg

SEQ ID NO: 7826 - RNA, 22 nt, synthetic construct
  source 1..22: mol_type = other RNA
ggttgcagtgagccaggattgt

SEQ ID NO: 7827 - RNA, 22 nt, synthetic construct
  source 1..22: mol_type = other RNA
cacagcagtatgaaaacaatat

SEQ ID NO: 7828 - RNA, 22 nt, synthetic construct
  source 1..22: mol_type = other RNA
tgttccctccaacactcatgtt

SEQ ID NO: 7829 - RNA, 22 nt, synthetic construct
  source 1..22: mol_type = other RNA
acctgaccaccaccaggacccc

SEQ ID NO: 7830 - RNA, 22 nt, synthetic construct
  source 1..22: mol_type = other RNA
aagggggcgctgcatgctgcca

SEQ ID NO: 7831 - RNA, 20 nt, synthetic construct
  source 1..20: mol_type = other RNA
aaaaaaatgtacttggttcc

SEQ ID NO: 7832 - RNA, 17 nt, synthetic construct
  source 1..17: mol_type = other RNA
aaaatgtacttggttcc

SEQ ID NO: 7833 - RNA, 17 nt, synthetic construct
  source 1..17: mol_type = other RNA
aaaaatgtacttggttc

SEQ ID NO: 7834 - RNA, 17 nt, synthetic construct
  source 1..17: mol_type = other RNA
aaaaaatgtacttggtt

SEQ ID NO: 7835 - RNA, 17 nt, synthetic construct
  source 1..17: mol_type = other RNA
aaaaaaatgtacttggt

SEQ ID NO: 7836 - protein, 1348 aa, synthetic construct
MSIKSDYFLGLDIGTDSIGWAVTDPEYHILRRKGKALWGIRLFDAANTAAERRTFRTSRRRIQRRRQRIRLLQELFAEEMVKLDPGFFQRLSDSAFWQEDKQEQQIYSLFTCENYTDVDYYREYPTIYHLRSALIQEKKEFDLRLLYLALHHLMKHRGHFLFNGSINNVTSFHTTFQTFADCLYDEFDIELECDSEDRFAEILKDKHARKTGKCSELEIICHIEKSNKQLKELFKLITGMKASLSVVFGDDELAEIEHNKISFSESSYDEVRLALEDEIQERTGILDIFHAVYSWAILADILEGGEYEGNSYLSVAKVSTYKKHGDDLRLLRTLVREYCPDHYKSFFSVSGKENYCAYAGTLKKNGKKQPIKRCSQEDFYKALKKLLNQMPTEQPEVKDIFIEIENGTFLPLQVSKDNGVIPYQVNKMELEKILQNAEEYLPFLKNIDEECGKTVSKKIIDLFEFRIPYYVGPLNTAKGENCWMVRKEAGRIYPWNFDEKVDRDQSAEKFIRRMTNQCTYLIHEDVVPKNSLLYSEFMVLNELNNVKIRSEKLPVELKQAIVLDLFKKQKQITGKKLLNYLNANGYDVKKEDLSGFDGNFKSSLSSYLTLKKVFGEELDKYSVQQMAEDIILWITLYGDDQKMLRRVIRKHYEQQLSEEQILSLSKLKFQGWGRLSRRLLSEMEGVDCETGECMTVMQGLRNTQNNLMQLLSQQFSFMELIEEENGNYYVDEITYDNLVKDMVISPSVKRAVWQTVQIVEEIKGVMGCQPKKIFVEMARSDEEKKRTVSRKDRLLEAYDAIKDEARQWQEELQKYSDGDFKAIKLYLYYTQMGQCMYTGRKIDLSQLNDATVWDRDHIYPQSKTKDDSLDNLVLVDRSVNAKKSDGMLSPEIQQRMRATWKYLKEKKLISEKKYERLTRVSPLTDEELAGFINRQLVETRQSSKAVATLLKRVYDEAEIVYVKAEAVSNFRRDNLDYIKVRDLNDYHHAKDAYQNIVVGNVFHEKFTSNPLRWLKNNPNTKYSLNQMFNFDLEKNGVVIWKRGKAGSIKCVEETLKRNDILFTRYAFCNKGGFFNQMLTAAPEDKTKAKGLVPIKKGMETWKYGGYTSVTPSHFMLVASKDKKGKEIRTIETVPLYRWKEFKENPDALLQYCREFYGLKEPKVLIPCIKKNARLVVNGFPMHLKGSTGKQLILQGAVQLCLNNENIKYLKKVTKYLEYNAQRRDKRTLLEVREVTGINKEENIQLYDVFVDKLSNTIYQYRPANPKDNLIKGREKFIELGLAEQCVVLGEVLHLFQCKPLTSDLTLIGGSPNTGTIKITKTISNCNVVKLLSQSIAGVKVREINLLII

SEQ ID NO: 7837 - DNA, 4047 bp, synthetic construct
  source 1..4047: mol_type = other DNA
atgagcataaaaagtgattattttttaggacttgatattggtacggattctattggatgggcggtaaccgacccagaatatcacatattgagacgaaaaggtaaagcattatggggaataagattatttgatgcggccaatacagcggcagaacggcgaacatttaggacaagccgaagaaggattcagagaagacgacagagaattcggttattgcaagaattatttgcagaagaaatggtaaaattagacccaggattttttcagaggttgtcagacagcgcattttggcaggaggataagcaagagcagcaaatttattcactttttacttgtgaaaattatacagatgttgattattacagagaatatcctactatttatcatttgagaagtgcattgattcaggaaaagaaggaatttgatcttcgtcttctatatcttgctcttcaccatttgatgaagcacaggggacatttcctgtttaatgggagtattaataatgtgacgtcatttcatacgacgtttcagacgtttgcagattgtctttatgatgagtttgatatagaactggaatgtgattccgaagatagatttgcagaaattttaaaggataaacatgccagaaaaacaggaaaatgttctgaattagagataatctgtcatatagaaaaatcaaataagcagctaaaagaactttttaaattaattacaggaatgaaagctagtttgagtgttgtgtttggtgatgatgagttagcggaaatagaacataataagattagtttttcagagagtagttatgatgaagtacgtcttgcattggaggatgagattcaggagaggactggtatactggatatctttcatgcagtttatagttgggcgattctcgcggatattttagaaggcggagaatatgaggggaattcttatctaagcgttgcgaaggtaagcacttataaaaagcatggtgatgatttgcggttgctaagaacactggttcgggaatattgtcctgatcattacaaatctttcttttccgtatcagggaaggagaattattgtgcatatgcgggtactttaaaaaagaatggaaaaaaacagccgattaaacgttgcagccaggaagatttttataaagcgttaaagaaattgctgaatcagatgccgacagaacaaccagaagtgaaagacatcttcatcgaaattgaaaatggtacttttttgccgttgcaggtaagtaaggataatggagtgataccttatcaggtaaataagatggaattagaaaaaatcctgcagaatgcagaggaatatttgccatttctaaaaaatatagatgaagaatgtggaaaaacggttagtaagaagattatagatctctttgagtttagaataccatattatgtagggccgcttaataccgctaaaggagaaaactgttggatggtcagaaaagaagcggggagaatatatccgtggaattttgatgaaaaggtagacagagatcaatcagcagaaaaatttatccgtagaatgacgaatcagtgtacatatttaatacatgaggatgttgtacctaaaaattctttgctttattcggagtttatggtgcttaatgaattaaataatgtaaagatccggtctgagaagctgccggtggagttaaaacaggcaatagtattggatttgtttaagaaacaaaagcagataacaggaaaaaaacttcttaattacttgaatgcaaatggatatgatgtaaaaaaagaagatttgtcagggtttgacggaaactttaaatcatctctgtcatcatatcttactttgaaaaaagtatttggtgaagaattagataaatatagtgtgcagcagatggcagaggatattatcttgtggatcactctgtatggagatgatcagaagatgttgcgcagggtaattcgaaaacattatgaacagcaattgagtgaagaacagattctttccttatcgaaattgaaattccaaggctggggaagattatccagacgacttttgagtgaaatggaaggcgttgattgtgagactggtgagtgtatgacggtcatgcaaggacttcgtaatactcagaataatctgatgcagcttctaagtcagcagttttcatttatggaattgattgaggaagaaaatgggaattattatgtagatgagattacatacgataatcttgtgaaagatatggttatatctccgtcagtgaagagagcagtctggcagacagttcagattgtggaggagattaagggggtaatgggctgtcagcctaagaagatatttgtcgagatggcgcgaagcgatgaagagaaaaagcgtactgtatctaggaaagacaggttattagaagcatatgatgcgatcaaggatgaggctcgtcaatggcaggaagagttgcaaaagtattcagatggtgattttaaggctattaaactttatctgtattatacgcagatggggcaatgtatgtatactggaagaaagatagatctgtcacaattaaatgatgcgacggtatgggacagagatcatatatatccacagtccaaaacaaaagatgatagtctggataatctggtattggtagaccggagcgtgaacgctaagaaaagtgatgggatgctatcacctgagattcagcagagaatgcgggctacttggaaatacttaaaagagaaaaagttgatttcagagaagaaatatgagcgtttgactagggtctcaccacttacagatgaggaattggcaggttttattaatcgacagttagttgaaacacgtcagtcttcgaaagcagtagcaacacttttgaaacgagtatatgatgaagcggagattgtctatgtaaaagcggaagctgtttcaaattttagaagagataatttggattatattaaggtgcgtgatctgaatgattatcatcatgctaaagatgcatatcagaatattgtagtggggaatgtttttcatgagaaatttaccagcaatccgcttcgttggctgaaaaacaatcctaatacgaaatatagtttaaatcagatgtttaactttgatttagagaaaaatggggtggtaatatggaaaagggggaaggctggaagtattaaatgtgttgaagaaacattgaaaagaaatgatattctttttacacgatatgctttttgtaataaaggtggtttttttaaccagatgttaacggcagctccagaagataaaacgaaagcaaagggacttgtaccaataaaaaaaggtatggaaacatggaaatacgggggatatacatcagtaactccgtcacattttatgttggttgcttcgaaagataagaaaggaaaggagataagaacgattgagacagttccgttgtataggtggaaagagttcaaagaaaatccagatgcattactccaatattgtagagagttctatggtttgaaagagcccaaggtgttgataccatgcatcaagaagaatgccagattagtcgttaatggatttccaatgcatttgaaagggagtacaggaaaacaattgattttgcagggagcggttcaattatgtctgaataatgaaaatataaagtatttgaaaaaagtcacaaaatatttggaatataatgcacagagaagagataaaagaacactgctggaagtaagagaggttacaggaattaacaaagaggaaaatatacagttatatgatgtgtttgttgataaattgagtaacacaatatatcagtatcgtccggccaatccaaaggacaatcttataaaaggaagagagaagtttatagaattagggttggcagaacaatgtgttgtgttaggtgaagtattgcatttgttccaatgtaaaccactcacgtctgatttgactttgattggaggttcaccgaatacagggacaataaaaataacaaagacaattagtaattgtaatgttgtaaagttgttaagccaatctattgcaggtgttaaagtgagagaaattaatttgttaataatatga

SEQ ID NO: 7838 - DNA, 4044 bp, synthetic construct
  source 1..4044: mol_type = other DNA
tctatcaagagcgactacttcctgggcctcgacatcggcacagattctatcggatgggccgtgacagaccccgagtaccacatcctgagaagaaagggcaaagccctgtggggcatcagactgttcgatgccgccaatactgccgccgagagaagaaccttccggaccagcagaagaagaatccagcggcggagacagcggatcagactgctgcaagagctgttcgccgaggaaatggttaagctggaccccggcttcttccagagactgagcgatagcgccttctggcaagaggacaagcaagagcagcagatctacagcctgtttacctgcgagaactacaccgacgtggactactacagagagtaccccaccatctaccacctgagaagcgccctgatccaagagaaaaaagagttcgacctgcggctgctgtatctggccctgcaccatctgatgaagcaccggggccactttctgttcaacggcagcatcaacaacgtgaccagcttccacaccaccttccagaccttcgccgactgcctgtacgacgagttcgacatcgagctggaatgcgacagcgaggacagattcgccgagatcctgaaggataagcacgccagaaagaccggcaagtgctctgagctggaaatcatctgccacatcgagaagtccaacaagcagctgaaagaactgttcaagctgatcaccggcatgaaggccagcctgagcgtggtgtttggagatgatgagctggccgagatcgagcacaacaagatcagcttcagcgagagcagctacgacgaagtgcggctggccctggaagatgagattcaagagagaaccggcatcctggacatcttccacgccgtgtattcttgggccatcctggccgatattctggaaggcggcgagtacgagggcaacagctatctgtctgtggccaaggtgtccacctacaagaagcacggcgacgacctgagactgctgagaacactcgtgcgcgagtactgccccgaccactacaagagctttttcagcgtgtccggcaaagagaactactgcgcctacgccggcacactgaagaagaacggcaagaagcagcccatcaagcggtgcagccaagaggacttctacaaggccctgaagaaactgctgaaccagatgcctaccgagcagcccgaagtgaaggatatcttcatcgagattgagaacggcaccttcctgcctctgcaagtgtccaaggacaacggcgtgatcccctaccaagtgaacaagatggaactcgagaagatcctgcagaacgccgaagagtacctgcctttcctgaagaacatcgacgaggaatgcggcaagaccgtgtccaagaagatcatcgacctgttcgagttcagaatcccctactacgtgggccctctgaataccgccaagggcgagaattgctggatggttcgaaaagaggccggcagaatctacccctggaacttcgatgagaaggtggacagagatcagagcgccgagaagttcatcagacggatgaccaaccagtgcacctacctgatccacgaggacgtggtgcctaagaacagcctgctgtactccgagttcatggtgctgaacgagctgaacaatgtgaagattcggagcgagaagctgcccgtggaactgaagcaggccatcgtgctggacctgtttaagaagcagaagcagatcacagggaagaagctgctcaactacctgaacgccaacggctacgacgtgaagaaagaggacctgagcggcttcgacggcaacttcaagtccagcctgtccagctacctgactctgaagaaggtgttcggagaggaactggacaagtacagcgtgcagcagatggccgaggacatcatcctgtggatcaccctgtatggcgacgatcagaaaatgctgcggagagtgatccggaagcactacgagcagcagctgtctgaggaacagatcctgagcctgagcaagctgaagttccaaggctggggcagactgtctagacggctgctctctgaaatggaaggcgtggactgtgaaaccggcgagtgcatgacagtgatgcagggcctgagaaacacccagaacaacctgatgcagctgctgagccagcagttcagcttcatggaactgatcgaggaagagaacgggaactactacgtcgacgagatcacctacgacaacctggtcaaggacatggtcatcagccctagcgtgaaaagggccgtgtggcagacagtgcagatcgtggaagaaatcaagggcgtgatgggatgccagcctaagaaaatcttcgtggaaatggcccgcagcgacgaagagaagaaacggaccgtgtctcggaaggatcggctgctggaagcctacgacgccatcaaggatgaggcccggcaatggcaagaagaactgcagaaatactccgacggcgatttcaaggccatcaagctgtacctgtactacacccagatgggccagtgcatgtacaccggcagaaaaatcgatctgtcccagctgaacgacgccaccgtgtgggatagagatcacatctaccctcagagcaagaccaaggacgacagcctggacaatctggtgctggtggatagatccgtgaatgccaagaaaagcgacggcatgctgagccccgagatccagcagagaatgagagccacctggaagtacctgaaagaaaagaagctcatcagcgagaagaagtacgagcggctgaccagagtgtcccctctgacagatgaagaactggccggcttcatcaaccggcagctggtggaaacaagacagagcagcaaagccgtggccacactgctgaagagggtgtacgatgaggccgagattgtgtatgtgaaggccgaggccgtgtctaacttccggcgggataacctggactacatcaaagtgcgggacctgaacgactaccaccacgccaaggacgcctaccagaacatcgtcgtgggcaacgtgttccacgagaagtttaccagcaatcccctgcggtggctgaaaaacaaccccaacaccaagtactccctcaaccagatgttcaacttcgacctggaaaagaacggcgtggtcatctggaagagaggcaaggccggctccattaagtgtgtggaagagacactgaagcggaacgacatcctgttcaccagatacgctttctgcaacaaaggcggcttctttaatcagatgctgaccgccgctccagaggataagacaaaggccaaaggcctggtgcctatcaagaaaggcatggaaacctggaaatacggcggctacaccagcgtgacccctagccactttatgctggtggccagcaaggacaagaagggaaaagagatccggaccatcgagacagtgcccctgtaccggtggaaagagttcaaagagaatcccgacgctctgctccagtactgcagagagttctacggcctgaaagagcccaaggttctgatcccttgcatcaagaagaatgcccggctggtcgtgaacggcttccctatgcacctgaagggcagcaccggaaaacagctgattctgcagggtgccgtgcagctgtgcctgaacaacgagaacatcaagtacctcaagaaagtgacgaagtacctcgagtacaacgcccagcggagagacaagagaaccctgctcgaagttcgggaagtgaccggaatcaacaaagaggaaaacatccagctgtacgatgtgttcgtggacaagctgagcaacacaatctaccagtacagacccgccaatcctaaggacaacctcatcaagggccgcgagaaattcatcgagcttggcctggctgagcagtgcgtggtgctgggagaagtgctgcatctgttccagtgcaagcccctgaccagcgatctgacactgatcggcggaagccctaacaccggcaccatcaagatcaccaagaccatcagcaactgcaacgtggtcaagctgctgtcccagtctatcgccggcgtgaaagtccgcgagatcaacctgctgatcatctga

SEQ ID NO: 7839 - RNA, 107 nt, synthetic construct
  source 1..107: mol_type = other RNA
gtttgagagtagtgtaagaaattacactacaagttcaaataaaaatttattcaaatccatttgctacattgtgtagaatttaaagatctggcaacagatcttttttt